United States Patent Application Publication US 2017/0283862 A1 - sequence listing, part 3

SEQ ID NO: 1 - DNA, 5315120 bp, Klebsiella pneumoniae subsp. pneumoniae MGH 78578 (residues 3,543,415-5,315,120 of 5,315,120)
tggcggcatcggcggtcatattgccgatcaccatcagttcaggacgccccctggttttcaggttggcgcggtagtcgagcacctctttaagggtaatggagggcagcagcgcccggcgcacttcgcgctggaagtacggcacctgcgagaccatctggatcggcattatcgcctgatcgtaggctttgcctttctcggcggaatccatcatctgcgcataccaggatttggcctgctccagctgctcctcagtcggcgtatagctgaagtatccctgcagcagatcgctgaacagcgccggaagatgctgggtatagccgttggcattgaccattaatccgttattagcgccggtagagaacgaaatgccgccgaccgccgcctggttactgagctggtcgagggcgatgccggcgagataatcgttgagggcaaacatcacctgccggcgagcgctgtccatcgcctggggattacgcagcaccagggagatgtccgccttcggctcgctggcaaaatactggctcggggcatacaccacccgcagcgtcggttcatcaaggatcagctgcggatgcggccaggctttatcgcttttgctaagggtgaagtcatccggaatataggggttgagcgccggcagctgcagctggatggcctgcgatttgtgctgccagtcagcgaacgtctgctcgctaatcttatccacctgatacggcgcatcgacaaagtaggccgtcttgttatgcggctcctgggggctgatataccagatgcgggcgttctgcggggtcatcatcgccagccggtctttgatcgcctgcgggtcgtactggtcggcaatattcaccacgtccagcgcatgctcgaccggcacccggatcatggtgtccgccagccattccacgtagtccatgtcgcggttgatcgacggatagcggaaatcgagcgccagcacatgcgccagttcgtcgaaatagcgtttgtcgatgccctgagtacgcaggaggtcgaggtagctgaaaatggccgccgtcacttcatcgcggtgcgccaggcctttgtcggtgagggtggctgagatcgccagtacgccgctgttgccgtttaccaccggatcggaatcggcgcggataccttccgccagaccctgtttttgcaaccagtcagagagcgtgcccgggctgcggttgccgataagataggtgaccagctcatcggttttgctgcggaagcgatcgctgttgttgtcgatgcgaaactcgacgcgcagcactttacgcggcatcgccggcacatagtgaataatgatgcctttttgcgcatccgtgaccaccgggacggtaatttccggcctgctgatctgacgattcggcacgcggccaaaggtgtccgcagccatgcgcgccagcgccggcaacggcttgttgctgtagatcaccgctttcatcagattggcggagtaccagctatcgcggaaggtgtgcagcgcatcaagcaccgggctgccgggcttatcgctgagcgtctcgaggttgccacccgagaagtgggccgccgggtgagccgggttgatggtctccgcgctgacctgggccatgcgcatcccgtctcgcgtccgggccatcgtcagctcggcgttgaccgcgttacgttcgcggtcggcatattttttatccagcagcggcgcggcgatggcgtcggccaggcgatctacggccccgtccagcgcatcattttccacttcaagataaaacgcggtgcggtagggcgcggtactggcgttatggctgccgccgtgcagcttaagaaactctgcaaggctgtcaggctggggatatttttgcgaccccatcagcgtcatatgttccagaaaatgcgccagcccctgatgatctgccggatcctgcagggatcccaccggcaccaccagcgccgacagcgatttcaccgcctgcggatcggaaaccagcagcacgaccatgtcgttatcaaggcggatcgcctgatactgacgcgtatctttttcgcttttgcggatcgtctcctgaatcggctgccatccggtgtcggcctgactaaacggcgcccagagggcggccagcacaacaaaaaccttgaaccataaactgcggggcattcacgaacctcatcattaacaaacttgcgctgcacagcgtgcagccttttatgtccatcagtccgtgatacgttgcgcatattaaatgaaccgtcattcactgcgcaatttttatactatttaaatttgtgtggaccgatggtaacgatatagcggtaacagataacgctgcgtctgggcaatgatttcttcgtaatgcgccggctccagcgaacgccacaggcgttgataccagatatcggcgccctccccgctgaccaccatgttcccttcgtaggtctgcaggaatttgctccgcgctttctgctgcgtctcttcgtccattaagatgacatccttttcggcgtcgtaacaggctttcagccaggcgccaccgctttccggcagcagcagcagcggctgcgacatccccagcaaatagccatccaccagctcgttaaggtacgcctgcgcctcggcgggcgccagcgccggaaagcgccactctccctctttccgcacaaacagccggctctcgccggtgccgccgctggagcagtagacaaggtgttccagccaaagttgcatcccctgggagacgctcagcagcgaaggccgccagcgcagcagaccgtccggctgcacctgctgcagccagccggtcaggttcacgccgccgcactgcagatcgatctccatgctctgcgcctgctggcgctcggccatcacccgctcggccagcgcctgcatctccaggcgctgcgtctcccagaccagctcgccaaaggcgccatacggcagctcgccggcggcgcgaaagcggcggaacatagccgagacgtcctgctcctcaataagcgtattgagcagttgctgattcagttgataacggctcagcccttcaagagtgaacggctcgtcgtctggaatatcgtcctcttcggcgcggaaattgacccgcaaacgctgctgaaagaacgcgcgtaccgggtgctgccagaagcgcagaagctgatcgaacggcaggctgtcaatcggcggcgcggtgagcggctgtataaaatcgctatgcgcctctccctgctggccggcggccgccagccattcacgagcgtagctcttgttctcgtcttcctggaaattggcaacgtcgaacggcatgcgcgtatgcagatgggtgatatgggctttaacccgcgcttcgctggcgtcgcagtcaagctcttcgtcaccggcgagacagtggctctggccgatataatccaccagctcctgcaccagcaccgaaggaaaacgctcgctgttgtcctgtatcgaacggccgatatagctgatatacagcgtctgctcggcggacatcagcgcttcgaggaacagatagcggtcatcatcgcgccggctgcggtcgccgcgctgcggcttctggctcattaaatcaaagcccagcggcggtagcgtgcgcggataaaccccgtcattcatccccagcaggcacaccaccttaaaggggatcgaacgcatcggcatcagggtacagatattgaccgggccggcaagaaagcgctggctgatccgctgctgatcgaggcgctgggccagctcatcgcgcagcagcgtcagcggcacctgctcgccatactgcgcctccagaccgctatcaataaccgccagccactgctgctcaatcagcgccagcgccgcttcggtctcgctgtccggcaggaaaaagtcattcagcagatcgcgacagaccggtagccactccgccagcggccgctgctgggccaggccgcgtcgccacagattaagctgcatcagcagcgacgcgaggttgcccaccagctcggcgatcaaaccgctggattcgtcatatggcagcaccgactgccattctccctcgcggctgtccatcgcgtagcccaacagcatgcgggtgaggccgaaccgccaggtatgctgcccggtcgccggcaggtccagctcacggacgttgtcgtcatccattccccagcggacgccggactcgttcacccactggcgcaggtagcgcagcccttcttccgtgatattaaagcgcgccgccagcaccgggacgtccagcagcgccagcacatcttcactggcgaagcggctgtccggcagcgagagcagcgtgataaacgcctgcagcaccgggtgcgactctcgggcgcgacggtcggagatcgcccacggcagccagcgatcgccgctggcggcgccaaacaccgcctgtatataggggctgtagctgtcgatatccgccaccatgacgatgatatcccgcggcgtgagcgtcggatccgcctccagcatcgccagtagcctatcgtgcagaacctccacttcgcgctgcggactgtggcagacgtgaatgctcagactgcggtcatccagcgccagcggacgtttgtcgcgactgtgggcgaatgcctctgcgctctgcccggccaccgccgcgttgcgcagttcgaggatatccgattgcaggttatgcaacaggttatcgggggcgatgtcgacaaaagcgtccagttcctcatagcgctccagccctgccagcaggtagatatagtcgcgccccagtttgccccaggaggcgagcaacgggttgccgacatcctgttccccggcgtcattaaacaaccccggcgcctgctcggtgtcgcgaaacagaggtagcgcgcgcgcctcgcggtgatggcgccgctggcgcgacagcagcttcgccaggaacgccggatccttaatgtctccccagtagtagcggcaggggttggtaaacaagacatagacatcgacatgcttacccagcgcctgcagcgcctgaagatagaccggcggcagcgcggaaatcccgcagatgaagacgcgcgacggcagcccggcgggcggttcgtccgctttttccagggtactgataaagcgctggtagagattggcgcggtgccactgcggctgccccagctcggcggtatagctcaccagcgcctgccacagcggcgcctgccactgctgggcatcgccgagaccttccacccgctggccggcctcccagcgcatcagccactccgggcgatagacgaggtactggtcatagaggtccgccacccgggcggccagctgaaacagcttgcgcttgtcgccgtcatcactcagatactggcgcagcaggataaaatcgtcttcctccaggtgctgcggcaggagggtcatcagcttccagctcatgctctgcttgctgaaggcgctttcgcccggaatatctttcaggacgcgcacgaacatatcccagataaagctcgccggcagcgggaactcgatattggcggcaatcccgaagcgcgcggccagggtcatctgcagccactgcgccatgccggtactctgcaccagcaccatttcggcctgaaaagggtcatccagccgctggcgctcgacgataaactccatcaacgcctcgagaacatccagccggtttgagtggtatacccttaacataattgctcctgactactggctgaccgggcaatgcagccgggtcatctgcacccgctttgcaacgggtctactgatcgttaccgtgatgctgacacatctttgcctcgatgtctgcatacggcttacctgcccgcgtgccggcgacggcggcgcggagagctggctatagcgccacgcgtcgcgccacagttgacgggtctggttcaactggacaattccttgcgccattccgcgctgatagccgcccagcgcggtgaccgtcagcaccatcagcgccatcgccagcacggtctccggcaggctaaacccccgctgacgcttcagggcatttgacataagctcgcctccctgagcgggcaaaaatcgctccagccgtgggcggaaaaacgcacctgcccgccgcgcacctcgccggactgccagacctgcacctcgccgctggcgctgctgagcaccagtgaaccgtcgccgaagatacgcagacaggcgcgccagccctgcggcgcctgctcccggcaggccagcgccacctgcgccgaccagacctgctgttttccccactgcagcgcggaatgggctatcgccgtatcgcggatcgcctgcgtttcgctggcggtttgcgccagcagcgcccgctgctgcaggttaagcccctcgagtaacaggctgccgagggtcagcaacaggagcaccatcagcagcgacgacattccacgctggcggatcacaggttataccccgtcacccgctgctcaacctcgctcgtcaggcccgtctgttgcgcggagcgcgccgccagcgtcacgctcagctccggcgcgaagcccggggtgacctgacgttgtaccgagaagcgcgtcaccacgatggcggccgggttggtgattttctcccatccgccgccgcggcagtcgctggccccgcgcagggtctccagcgcgccgtcgcgcaggcgaaagccggtgctctccgccgctgccgcgggggaagtttcccatctcccgttgctgttcgcatcccagcgcacaatcagacactccccgccagcggctagctccagcccggctccgccgcacgctccccggcagtacccggcgcgctgcagatgttttcccacggcatgcacgcgctgccacagctcgttctccagggccagctgttcgccctggcgcagaatatgacgctgcagggcaggcagaaagcggcaggcccccatcagcagcagcgagccgatggccatggcgataagcgcctccgccagggaaaatccgcggcggctcactgacaccctcctgcgctgtcgctgcggcataaacgaatccgcccccagtgtgagatcacaatgctccagctgccggccgcgctctgcagccgcagattccccgcccaggcggtgctgcgcagaccataaaaccccagaccaggcgtaacgccagccagcgtgatccccggccagcgcgggcgcagcgtgaaggatgtccccgaggcgcagtcaggcccctccccatccgcgctcaggcaccagcccacttcgtcctggccgacgcgaagcacgcggtcccggttgtaggcgttggcgtcatcgcgcagaaagagcagaaaatcccgcacctggacggcggtttgccacagtcgttgctgctgctgccagcgctgccagccgtacaggccgccgacgctgaggatcatcatcagtgtcagcgttaccagggtttccatcagggtgtagccatgttctctgttcatggcgtcgagtatgccgcggcgattggctctggcgcgacgacggaaaatagctttcccggccagatacgcaaaaaagctttgcatactcgacagaaggacatttttttgcgagcgtctacccaacttcgcccaccgcaaccacctgtggcctggggcaggtgaaaacgaccttctcccggtggtaacggaaagcgctcccatcgggtggtgcgaagggcataaaaaaaccggcgccatcgggcgccggttagtcaactctgctgggggttaaatcgccaccggcgctttaatgcccgggtgcggatcgtaaccttcaatctcgaagtcttcaaagcggtagtcgaagatagacgccggcttgcgtttgatgaccagcttcggcagcggacgcggttcgcggcttagctgcaggttggtctgctcaagatggttgctgtacagatgggtgtctccgccggtccagacgaaatcaccgacctgcagatcgcactgctgcgccaccatatgcaccagcagcgcatagctggcgatattgaacggcaggccgaggaacacatcgcaggaacgctgatacagctggcaggagagcttgccgtcggcgacgtagaactggaagaaggcgtggcacggcgccagcgccattttatccagctcgccgacgttccatgccgagacgatgatccggcgggagtccgggtcgtttttcagctggttcatcaccgtggtgatctggtcgatatggcggccatccggcgcaggccaggaacgccactgtttgccgtagaccggccccaggtcgccgttttcatccgcccactcgtcccagatggtgacgttgttctcatgcagataggcgatgttggtgtcgccctgcaggaaccacagcagttcatggatgatggagcgtaaatgacagcgcttggtggtcaccagcgggaagccttcctgcaggttaaaacgcatctgatggccgaaaatggagatcgtgccagtgccggtgcggtcattttttggcgtgccctcggtgagcactttctgcatcaaatcaagatactgtttcatggttcctcaagaattctgttgctgcggacggtggcggtaagcccaaaccatcataatgatacccgcaagcaccatcgggatcgaaagaatctgccccatgctgatgtactgcacccagccgccggtgaactgggcgtcgggctggcggaagaattccacgatgatgcggaacaggccgtagccaatcaggaacagaccggaaacggagccggtcgggcgcggtttacggataaacaggttgaggatcaggaacagtaccacgccttccagcgccagctcgtacagctgcgacgcgtgacgcggcagcgcgccgtaggtatcgaacagcgattgccattccggatgcgtcggcagcagcgccaggtcttcggcacgggagcccgggaaaatcatcgtgtagtggaagctcgggtctacgcggccccacagctcgccgttgataaagttgcccagacgcccggcgccaagaccaaacgggatcagcggcgcgataaaatcggagacctggaagaaggtgcgtttggtgcgtctggcgaagataatcatcaccaggatcacgccgatcaggccgccgtggaacgacatgccgccgtcccagacgcggaacagatacagcggatcggcaagaaataccggcaggttgtaaaacagcacgtagccgatacgaccgcccaggaagacgccgaggaagcccgcgtagagcaggttttccacttcatttttcgtccagccgctgcccggacgattcgcccgacgggtggccagccacatcgcaaagacaaagcccaccaggtacatcaaaccgtaccagtggagggagaccgggcctagagaaaaaatgaccggatcgaactccggaaaatgcaggtagccactattcatctgtcaccataaagacttgttattccgccgaaagtggacagcggtgatgatccatacccgaacaaaacgggcacgccgaaggaggcgaatcatagcataagccacaagagcgatccgcgccgaacgtgtaaaagatatgtatacggatgctaacagaatgccgttttcccggcggtaccctactttgccggagggtgcgagcagaggatccccgggttacggcttacgcctcacccgggctagcgctaccgcccgccgcggatcaggccgccgagaccgcgacgctccataaaggccgccacctgatggcgcacctcggcggtcatctgcgcatcgaggctgcgacgcgacagctcctgcgcctcttcgatatcaatgcggcgcagcagatacttcaccctcgccaccgagcggccgttcatcgacagatggcggtaaccgaggccgataaggatcgtcacgcacatcgggtcgcccgccatctcgccgcacaggcgcagatcgatgccaaagcgctccgcgtcatgggcgatcatcgccagcgcccgcaataccgcaggatgcaggctgtcatacatgctggcgacccgggtattgttgcggtcgacggccagcaggtactgggtcaggtcgttcgtccctaccgagataaaatcgatccggctggccagctgcggcagcataaagaccatcgacgggacctccagcatcacccccaggcgcggacgtgggatggcgtagccgatcatctcttccacttcccggctggcgcgatcgatcagccgacgggcctcatccacctcctccagactggtcaccatcggcagcaaaatgctgaggttgccggtggcggcgttggcgcgcagcatcgcccgcacctggatcaaaaagatctccggctgatcgagggtgatgcggatcccgcgccagccgaggcacgggttctcttcgctgatcggcatatacggcagctgtttatccgcgccgatgtccagggtacgcagggtcaccggtttgctgttaaacatctgcagcatgccctgatactgggcgacctgctcctcttctgaggggaagccgctctgcagcataaagggaatttcggtgcggtagaggccaatgccgtcaacaaagctgccgagcttctcttcgtgctccgggcttaagccggcgttaagcatgactttcacccgctcgccgcttttcagctccgacgcgcgctggagatcgtcctccgccaggcggctgagttcgttctcttcgctgataaggcgctgatactcctgcaacaggacaggttcaggatccaccagcagctcaccgcgatagccatcgacaatcagcgtatggccatgcagcagcgagggctgaatatcggcgcccatcaccgttgggatgccgagggcccgcaccataatagcggcatgggagttggcggcgccatcgcgcaccaccacgccggccaggcgatcctgcggcacttcggcgagggtggtggccgacagctcgtccgccacgaggataatgcgcgccggccaggtgttgggcccctgaatactgtcgtcgagatggaacagcagacgctggcccagggtacgcagatcgccggcccgctctttcaaatagccgtcgctcagcgcggcaaactgttcggcgaacttctcaatgatctttttgacggcccactcggcgacggcgcctttgtcaacttcggcaaacagctcgcgacgcaggcgggcgtcagagagcaggtgcgagtagagatcgaagatcgccgccgtctctttttgcgccccggcggcgtagcgtttgctgtagcgacgaaactcgttggccgcctcttccagcgcaccggtcaggcgttcgcgttccgaggcggtgtccagcgtcgaggcttcatacacctgctccatcagcggcaggctgacgtccatccagccctcggcgatcgccaccccggaagaggccggcagagcgcgaatgcgcgtttgacgatactggccgaacagggcgttcagctgggactgggagaggatcgccgccatctgggtggcgagggtgacgaggaaagactcttcgctttcatcaaactgacgcagctcgcgctgctggaccaccagcacgcccagcagctggcggcgctgaatgatcggcacgccaaggaaggcgcggaagcggtcctctttgacggcggggatatatttgaagctggggtgtttttgcgcatcggcgaggttgatgggttccgccaggcggccaacaagccccaccaggccttcatcgaacgccagcgcaacggtgcgcccgcgaggtttttttaacccgcgggtggccatcaggtaatagcagcgtcggtcattgtcagccaggtaaaccgagcagacttccgtctccatcgcctggcagacatccgtcaccagaatatccagcgcctcgtttaaacgcggcgcgctcgcgaccttctcgactatttctcgcaaccgagtgagcataatgtgcgtggcttaacctcttttacgtcgataagcaggcgcgttttgcggcttaggtgcgctctccgccagcgacatggtcacgctggcgaactctttcatcacccggcggtagacgtcgcgcttaaacgacaccacctggcgaaccgggtaccagtaactcacccagcgccaaccatcaaattcaggtgtactgctggtttgcatattgatgtccgcatcattgccgatcaactgcaaaagaaaccacttttgtttctggccgatacaaaccggctttgtgtcccaacgcaccaaacgtttaggcaacttgtaacgcagccagttacgggttgaggccaggatccgcacatctttacggcttaacccgacctcttcaaacaattcccgatacatcgcctgctctgcggattctcctggattaatgcccccttgcgggaactgccacgagtgctgaccatagcgccgggcccacatcacctggccctgacgattacagattacaataccgacatttgggcggtagccatcgtcatcaatcaccggactacctcaagataagcttcaatgtgaatgattgtttcacactcgccggaaacggtaaaccactctgttcgcacactgagaacggataacatttgaataactcacagtaattgccagagttataaacaatgaaagcgcgtgacagccgattttattcactttttctgtggatagagttgtgaagaagtacggaattaacccgggaaaacccagagtaatccgaacatcgcatcgctagcatctgaaaataatagtatcatattcataaagttagaatatattcctttcacacattacagcataacgtgacgatcatcacacatgcgatccgccgactgatgaaagatcgagcaatgtcgattttatccacagattacgcgcaggccaccggcagattttctctaaaaattcgattttcgtcgcacgtcaaggctgtaaatcgaaccagtagtgagtcttttccccagttatcccacttttctgtggataacatggtgtaagatcctgtttattgtcagtgaccagttctggaaaacccgtttacaccgttttcataagccgcatgatgagtttaaaaagccatataaatcatgagattggtatagttactcagaaaacggtaaactctatccacaacgcgcaaaattagcgctcactttttaaccaaaggtattaccctatgcccgctatcgctccgctcgcctcaccgccgcaaagtcaggaacagctgctggcccaggcccgccagctggccggctattcgctgggcgagctggcggcgctggcggggatccccattccgcgcgatctgaagcgcgataaaggctggacgggcattctgctggagctgtggctgggcgccagcgcaggcagtaaacccgagcaggatttcgccgcgctgggggtcgagctcaaaacgatccccatcgacagccggggacgcccgctggagaccaccttcgtctgcgtcgccccgttaaccggcaatagcggcgtcacctgggagagcagccatgtacggcataagctgcagcgcgtcctgtggatcccggtggagggtgaacgcaccatcccgctggcggcgcggcgcgtcggcgcaccgctgctgtggagcccggacgaagacgaggagcgccagctgcgcatggactgggaagagctgatggatctcattgttctcggtgaggtcgagcgcattaccgcccgccacggcgaggtgctgcagttaagaccgaaagccgccaacagcaaggcgctgaccgaagccatcggcgcccgcggggagacaatcctcacgctgccgcgcggtttctatctgaaaaagaattttaccgccgctctgcttgcccgccatttcttgttacaacacgattaattttttgttctgcgttgggggttgcatataattgctgctttctattttgcaggactttgaacaatgttatttgcatggataaccgatcctaacgcctggctggcgctgggcacattgacgctgctggagatcgtgctcgggatcgacaatattattttcctctctctggtcgtggctaagctccccaccgcccagcgcgcccatgcgcgccggatcggtttgatgggcgcgatggtcatgcgtctggcgctgctggcctcaatcgcctgggtcgttaagcttaccaacccgctctttaccgttttcggtcaggagatctcgtttcgcgatctgatcttgctgctcggcgggctattccttatctggaaagccagtaaagagatccatgaatctatcgaaggtgaagaggaggggctgaagaccaacgtccactccttcctcggcgccatcgtgcagatcatgctgctggatatcatctttagcctcgattcagtgatcaccgccgtcggcctgtcggatcatctgttcatcatgatggcggcagtggtgatcgcggtgggggtgatgatgttcgccgcgcgacccatcggcgattttgttgaccgtcatccttcggtgaaaatgctggcgctgtcgtttctgatcctcgtcggctttaccctgatgctggaaagcttcgacgtccatgtgccgaagggatacatctatttcgccatgttcttctctatcgcggtggagagccttaacctgctgcgtaataagaaaaacccgctgtaaaccacaaaattgcagcctggtcacaggctgcaaccctttttcagactttactgctttttatgtctcacaaatcaggctattaatagacgggtatggggtgcagctactgaagaggtgttgacgatgaagaaatgggcagtattgatttccgccgtaggactggcgttctcggtttccggttgcagcagcgattacgtcatggcgaccaaagatgggcgaatgatcctgaccgacggtaaacctaccgtggatgacgataccggtttaatcagttacgaagatcagcagggtaataaaatgcagatcaatcgtgacgacgtttcgcaaatcattaagcgttaatctttccctgtcggccccagcttctgttgacgctgcgcttaccgaccaccagtcttttgagaagagtcgggatataccaggacgccgcgggtttcacccaccgcccctcctcgtcacccggcttttttgattttttacttcctctttttctcaccctctgccatgttgatactcctttgtcggggaatgcctgaccttataaataaaaaggaagctggctatgcagtatcaccgtatcccacacagttctcttgaaatcagcaccctcgggctgggaaccatgacttttggcgaacagaatagcgaggccgatgcccaccagcagctcgattacgcggttgccaacggcatcaacctgatcgatgtcgctgaaatgtacccggtcccgccgcgcccggaaacccaggggctgactgaaacctacgtcggcaactggctggcgaaacgcggcaatcgcgaaaagctggtgctcgcctcgaaagtcagcgggcccgcgcgcaataacgacagcagcattcggcccaatcacgtcctggaccgcaaaaatatccgcgaggcgctgcacgccagcctgaagcggctgcagaccgattatctcgatttatatcaggttcactggccgcagcggccaaccaactgctttggcaagctgggctatacctgggccgacgccgcgcccgccgtgacgctgctggataccctcgaagcgctgaccgagttccagcgcgccgggaagatccgctacatcggcgtgtcgaacgaaaccgccttcggcgtgatgcgttatctgcacctggcggataagcacgacctcccgcggatcgtgactattcagaatccttacagcctgctgaaccgcagctttgaagtcggcctcgcggaagtgagtcagttcgaaggcgtggagctgctggcctactcttgtctggctttcggcacactgaccggcaagtatctcaacggtgcgaagccggcaggggcgcgcaatacgctgttcagccgctttacgcgctacagcagcgagcagtcgcagaaagcggtagcggcctatgtggatatcgccaaacgccacggcctcgatccggcgcaaatggcgctggcctttgtgcgtcggcagccgtttgtcgccagcaccctgctgggggcgacgaccatgacgcagctgcaggccaacgtggaaagtttgcagcttgagctaagcgaagaggtattagcggagattgaggcggtgcatcaggtttatacctacccggcgccgtaagaaagcaaagccccgggtaaggcttatacgccttacccgggctactgaagagcagatattggcgaccccctcgcccagtcaagcgcagcgcaagccgggaggttatttacgccgcccccagacccacagcgcggcaatggccacggcgaataccgcgccaaagcctatccccacggcgaccggtggaacgcccacgctcaccgccagggaatagagccccagcatcagcagcatcgccacgttctcaccgaggttctgtaccgcaatggcgttacctgccccgaccgaatgtttcccacgctcctgcagcagcgcgttcagcggtacgataaagaacccgccgaacaccccgagcagcagcagcagaccgaacgccggcagcagcgactgctgcaccgcaaaggctatcaccgcgataccgatcaaaatcccggccggcatacagcgcgacaccgtctccagggtcaccagcttcgccgccgccccggcacccagcacaatccccaccgccaccatcgcattaagataggtgggcatggcgttgctggtaatgcccagcgccaccggcacccagatcaccagcaggaaacgcagggtcacgccagcgccccagaacaggctggtgcccatcagcgaaaagcgggtttcgccgttgcgccacagcgtccggcaggcgctgaagaagctgtgcgtcattggcttaaaacgccacgactgccccggacgcgctgccggcagcctgggtatccacaggttagccactaccgccccgccgtagaccagcgcgcagacgatcagcgccgccagcacgtgccagtcggcgaggatcccgccggccatggagcccagcaggatcgccgcgatggtcgaggactccatcagtccgttagccttcactaacttatcgccggtggtgagttcgccgagaatgccatacttggccggcgaataggcggcggcgccaatccccaccagcgtatagccgataaacggattgacgccgaagcagatgcagccggcgccgagcagtttcaggccgttggccaccatcatcacccggcctttggcaaagctatcggcgaactgaccgacaaagggggcaaagaggatgtaagcgcccacaaacaacatctgcaggaccggctggctccactccggataatagagctgcttcatcagcgccagggtggcgaagagaagcgcattgtcgccgaaggccgacaggaactgggcgcagatcaccgccagcatccctttcgagtacagcgaagggttagtatgtactgactcactcatgggttgtttccgcctcgtcgaccatatttttcagggtgacatagtctggcttgccgctgccgagcaccggtagctgtttcagccagcgtatatctcgcggcaccgccagctccggtacgccgtgctggcgggcgtagcgcagcagggcttcacgagtcagttcattatcggtggtaaacagcaccagcgcctcgcctttgctggcgtcctgtttaatcgccgtggcgtgcattttgtccggcgacgcgccgagggccacctgctccaccatctcgagggagatcatctcgccggcgattttggcgaagcgcttcgcgcggccctgaatgcggacatagccctgctcgtcgaaggtaacgatatccccggtgtcataccagcccgcttccatctcgccgtgctggttttccgccgcaggcgcttccagcacgccggggttttccacccgcaggtagcctttcatgatgttcggccctttcagctgcagccgccccccttgatcaatgcctggcatcgccagcaggcgggcgtccatccccggcaggatgcggcccacggtgccgaccttcgccgccatcggcacgttaatcgagaccaccggcgcgcactcggtcacgccatagccttcgagaatgcgcaggccgaatttatcctgccacagctgtttggtgctctcctgcagcttctccgccccggcgaccacgtagcgcaggcggtaaaaatcgtacggattggcgaaacgggcatagttggcgaggaaggtcgaagtgccgaacagcaccgtacagttgcgatcgtagaccagctccggcaccacgcgatagtgcagcgggctgggatagagaaacacttccgccccggtaagcagcggcgtcagcaggccgacggtgaggccaaaagagtggaacagcggcagcgccgacataaagcggtcattggcggtaaagtcggcgatagttttgatctgctcgacgttggacagcagactcttatggctgtgcaccacccctttcggattgccctcggaaccggaggtgaagaggatcatcgccgcgtcttccggctgctgcttaacctgcgccagacgcggcgccagcagatgagcaaaaatccacagtttgtcagcgagggtgatatcgcctttaagatcttccaggaatacccagcgcacctgggtcagctgctccggcaggtgccagagtttgcctttatcgaggaaggtgcgcgaggtgaaaatggtgttgagctccgcggcggctatcgcgctgctgagccctttcaccccggcggtatagttcatcatcgccggaatacgcccgcgggcgatagcgccgaaaatcaccgccgcgctgatgccggcgttaggcagcatcaggccgatcttctcgcccggctggctgtatttttccagaatgcgggcgacaaacagggttttggttagcagcttgcgataggtatccggctggaagttgatatcctccacgcagggtttgcgcgcgccgaagcggtcctgcgccgccagcagcgactcatacagggtttcccgcgggcgcaccgccatccgggcttccatcatgatctgatgcagcatctccccggcgatcttccgccggtcgcgggcgcgcggcgcctcgggcatcggcagatgggtgggcggcaggagatgcagctgaatacgcgggaacaggcgacgtttcaccagccccttcagccggctgaagggcgtcagttcggcgccttcaatacgcagcggcacaatggtcgcctgcgatttggcggcgacaaaggcggcgccgtcataaattttcatcagcgagccgctgaccgaaattcgcccttccgggaaaataaccaccggccgcccctgctcaatcaggcgcaccagatgtttgatcgacatcggcttggtcgggtccagcggcacaaaatcgataatcggcgtcagcgcgcgcataaaccagcgctggctgattgaggtatagaccgcaaaaaccggtcggaccggcaaaaacagcgccagcagaatgccgtcgaggaaagagacgtggttcggggtgattaagaccttttgctggtataaagcctgcgtgtcgccggtcagtctgacccggtataaccccttgaacagcagtctgaaaaatcccaaaagcataacaactccatgtgaccggttgatgagtcaaagcaggttacacgagaaggcatgggaaagcagtgcagcggggggattttcggaataaaaaaaacctgcgcatccgcgcaggtcggtgtaagacgttcagtacgaagagcgtacctgagaaactcacctatcaatacctctgggatctcgattgtcacgttttttggccgtaacgggccagcgggaaaacgcaagggagtgagcctaagtgcaacgaggtattacgattttcgctatctgtaacaacgccgatagcgggcaaaaaaaaacctgcgcatctgcgcaggctggtgtaagtaaagtggtcaacgtgacgttgactccacctatcaatacctctgggagagccagaatatcaaccggatccgcgaacaaaccagcgaacattcgcaacagcgcatcgcaaagtgtaagcaaaggtttgtatttccctgcgccggtttcaattaccgatcgcgtcaatgtaaacaggtcaccgataagcccgcgctgaatcacatttgcgccattccttcgccgccgcgccttgaatctgccgctctttcccgtaacatagcagtatgtaaacgcttaccctagaaaaggcatggtatggcgactattaaggatgtagcccgactcgcaggagtctccgtcgctaccgtctcccgcgtcatcaacaactctcccaaagccagcgaagcctcgcgtcagtccgtgggcgcggcgatggaaaccctgaactatcaccccaacgcgaacgcccgggcgctggcccagcagtcaacggaaaccgtcggcctggtggtgggcgatgtctccgaccccttcttcggcgcgatggtcaaagccgtcgaacaggtggcctaccgcaccggcaattttttgctgattggcaatggctaccacaacgtgcagaaggagcgccaggcgatagagcagctgatccgccatcgctgcgcggcgctggtggtgcacgccaaaatgatccccgatgaggaactggcggggttaatgaaacagatccccggcatggtgctgatcaaccgcatcctgcccggatatgaaacccgctgcgtggcgctggacgaccgctacggcgcctggctggcgacccgccatttgatccagcaggggcacacgcgtatcggctatctgtgctcaaaccatgatatctccgatgcggaagatcggctgcaggggtactacgcggcgctggaggagagcggcctgccgtgcaacgaccggctggtcacgtttgccgagccggatgaaagcggcggcgaacaggcgatgaccgaactgcttggccgcggccgccactttagcgccgtcgcctgctataacgactcgatggccgccggcgcgatgggggtgctgaatgacaatggcatcgacgttccgcgggagatttcgctgattggcttcgacgatgtcctgatttcgcgctatgtccgcccgcggttgactaccgtccgctatccgatcgtcacgatggcgacccaggcggccgagctggctttagccctggcggagcagcggccggcgccggagatcacccatctgttcagcccgacgctggtccgtcgtcactcggtggtcgccccgcaggaaggcgataagtcatagcgatagaggtgcacggcggtggccgggtaatccagcccctcgccgatgtagcgccagccgaagcgttcatagaaatcccggcaggcggagtagagatagagctcccgaaagcccgcgcggcgggcataatcgatcacatgccgctgcagttttccggccagcccctgaccgcgggcggcgggcgcgacgaacagcgccgccagccagggaaacagatcctggcggctgatcaaatcgcagcgccagaggccaatcgtgccgagcaactgctcgccttccacggcaataaaggtcaacggcagcgcctccgccgtctggctatgctgcacgatgctggcgaagaattgccgcggcagcgtctcgccgccaaaggcctgccacagccagtcggtcacctgcggggcgaactgcggcgcagcgtacagcggcaggatcgtcataccagcttcccctgaaaaatcggcactgagtcgaacagatagccgtcaaagtcgggggcgtcctcatcggacagctccagcaggctgtttttgacgttttccagatgctgccacatcgcctgccaggcgcccatcacatcgcgacgccgcagcgcggcgagcagggtctgccggtcgccgagccatttcagccgccaggcgcggctggcaatatgcacattgaactgctgccacagcgggctgctgtccatctgcagccagatccgctctaccgtcgccaacagcatctggttctgcgtcgccccggcgagcaccagatggaacagacgagcgttatcctgcgcggtgtcgttgagagcgattgcccgctgctcctgttcaataatccgcttcagattgtcgatatcggcgcgggtggccattttcgcggcaaaggcggcgatgttgctctccagcagctggcgcgcctggagaatttcaaacgggccgacgtcgctgctgagcagctgctcctcttcgctgtcgttctcgtggggaatgcgcatgacatacaccccggatccctgacgaatatccaccgtcccctgcagctccagcatcagcagcgcttcgcgcacgatggtccggctgacgccataggtttcggcaatatggcgttccggcggcaaacgcgacccgaccgggtagcgcccctgcgcgatctgggcgcgcaggtcatcaccaatctcctgatagggcttcttttccggcggaactatcgctttttccacaaaatcacctgtgcgttacatgcctgcgagtcaaatacgccgctatcttagcaaatattgcccccggctagcggtattcatcatcgatatccagcaccagttcacgccgttcgcccagttgacgaaaccagtgcgccgaggctttggctcgccgggcgcgatggttttgcagatcgatttcgataagcccgtagcggtttttaaaggcgttcatcggcgatacgttgtcggtaaacgcccacagcatatagccctggcagttggcccctgcctcgcgggcgcgcagggtgtgccacagatgttcgctgataaaacgaatgcggtagctgtcatcgatgacgccttcgcggttacggaactggccttcgttttccacccccatcccgctctccgccacgaaccacgggatgttgcgatagtcattttttatccgcatcgccatatcaaagatgatttgcgggtagatttcccagccgcgggaggcgttcatccgccggccgggcagctcaaacggctcataataccaggccggatggaacggggtatgcggatgccaggcccgcgacggggctttgacccggtgcgggtagtaaagattaatccccagctcatcgacggtgtgctcgcggataaccgccagatcctcctcgctggtctcccacgtcacctgatgctgctcaagcagcgcgagaagctccggcggccagacgccgtgcaccagcgggtcgaggaacatgcggttgtagaacagatcgtagatctccgccgcgcgcaggtcatggggggcgcgtgagcgtgggtaggtcacctccggattgaggatgcagccgatggtcccgggatagccgagctcgcgaaaccgcttcacgacgctggcggtcgccagcaccttatgatagttccactgcatccaggtgctggtgttctgctcatagggccagcgcagagcatccagatagacccgggtctgcaccacaattggctcattaaaggtaaaccagcgcgtcaccttcgggtggtagcgggcaaacaccttctccgcgtagcgcacaaacagctcaaccaccgttttcgacccccagccgccatatttttccagcagatagccgggcaattcataatgctcaaggcagatcatcggcgtgatgccgttggccagcagcgcatcgaacagctggtcgtaataggccgcatactcctcatccaccgtgacgttttcatagtcggtcagaaagcgcgaccagttgattgaggtgcggtagtgggtcagcccggccagcttcatcagctgcacatcttcctgaaagcggttgataaaatcggtggccaccgccgggccatagccgttatgccagacgtggcgatcgtttttgtaccagagatcgggccaggagtcctgccctggttttttcccgctccagccttcggtctgccaggcggaagccgccgcgccaaggataaaatcatcgggaatggtcatccgtacggtagtcataggctcctcagacagggttggcggtttgttgattgtctacctgacgctgcgcggcatcggcacggcgggaggcgattttgacgaaaggcagatagataagcaccgcgacgacgatgcagataagctgggtcaccaccgcccccatcgagccggcggtggagagccaggcgttgatcagcggcggcgtggtccaggggaccatcaccaccgccttgccggcgaagccggtcagggtggcgaaatagccgatgctgccggtcaccagcggggtgatgataaacgggatggcgaggatcgggttaagcatgatcggcatcccgaagatcaccggctcgttaatattgaacagccccgggcctatcgacagcttggcgatctctttcatctctttgcgtctggtggcgatcatcaccgcaatcagcaggccgatggtcagccccgagccgccgatgctcatgtagacatcccagaagggcatcgtgatgatgttcggtacctctttcccctgctcaaaagcgctcatattgacggtgatcgctcccagcagcagcggctcgcggatcggcttgatcatctggttgccgtgaatgccgatcacccagaacagctgggcgacgaacatcagcagcaggatccccggcaggctctgcaccacccgctccagcggttgctgcaccacctggtagaccgcatcgtagagatacattcccgtcagctggtgaaagagaaaaccaaaggtggcgatcgcggtggtggtgatgatcgccgggatcagcgcggaaaaagaggcagagacgttcggcggcacggtatccggcattttgatcttcagtcccttgcgcccttccagccagcagtaaatctccactgacagaatggcgatgaacatcccaaggaacagactgcgggtatcggaaaactggcgcagcaggacatctttcaccacgtgcatctggccatcgaccatcatctccaccgtggtcggcgtgacgcagataaagcagatcaccgccaacaggccgggaaacaggcttttgatgccgttgatccgccccagctcaataccgatcagaaacacggcgccgatattgaggaagttgagcgtagcgtagttaagcgcgctggtgatcggcttcagcgccgcaagaaaggagagcgaggaaaagctggcgagcccattcttcggatccagcaccatattggagatcagcaccgaaaaggccccgacgatgatcaccggcatcagggtaataaacgccgatttgatcgccataatgtagcgatagctgttgaatgtcgtcgcgaaacgccccagcgcgtcgatcagtttgtcctgtaatgccataaaagagtacctcagtgtaaagggcttaatgcggccaggtgaacagccagagacttttggcataccaaaacatagtcgccaggcaaaaatagttctgtgacagcgctcgcaacgcgcacagtggtatcccaaatatccgataaaatcgacattggcataccagagtctgtcggctcgtcagttcctgccaaaagcgtgatcgcgatggtttttccgccccgccccgtcgatatgtcccttttcggtctgtgataaactgcgctttaccacgtgaaatcaggaatcgatgaatggctacaatgctggatgtctcaattcgcgcaggcgtctcgaaagcgacggtttcccgcgtgttgaacggcacaggtcaggtgaaagagagcacccgccaacaggtctttaaagcgatggaagagctgggctaccggcccaatttccttgcccgctcgctggccaatcagaccagcaatagtatcgggctggtcgtctccacctttgacggcttctactttggccgtctgctgcagcaggcgtcacgccagaccgaagcctggggaaagcagcttatcgtcaccgacggccatgatacgccggagcgcgaagaggaagcggtgcagatgctcgccgaccggcagtgcgatgcgatcatcctctatacccggcacatgagcgagaaggcgatcatgtcgctgattaactcgatcgccatgccgctggtggtgattaaccgcgatgtggcgcaggcccgcgaacgctgcgtgttcttcgaacagcaggaagccgccttccaggccgtggagtatctgattacccagggccaccgcgatatcgcctgcatcaccgtcccgatgcatacccctaccggccaggctcgcctgcagggctaccgcaacgcgctgataaaacatggtattgagtgggatccgagccgggtgaagtatggggactcgacgatgacccgcggctacgaactgtgccgggaactgctggacgagaaagcccgcttcagcgcgctgttttcctgtaacgatgatatggcgcttggggcgtcaaaggcgctgcatcaggcggggctgcgtattccacaggatgtgtcgctgtttggcttcgacgatgcgccaagcgcgaaatggctggagccggggctgtcgacggtttatctgccgatcgacaacatgatcactacggctatcgaccaggcgatcaagcttgccaatcagcagccgatagaaacgatcccgccgtttaccggcacgctggtgcttcgcgagtcggtgacgacgggacctttttttaaataagctctaaggccagcagctcctggatggtctggcgacggcggatcagccgcgccttgccgccatcaaacagcacctccggcagcagcggacggctgttatagttggacgacatcgaagccccgtaggcgccggtgtcatggagcaccagataatccccaggcgccactgccggcagcaggcgggtctcgactttgcccccctcctgctgggtaaagacatccccggattcgcacagcggcccggccaccacggtttcgacctgcggcgcggcgctgagatcccggccatcccccgccagagcggtgatatggtgatagctaccgtacattgccgggcgcatcaggtcgttaaagccggcgtcaatcagcacgaagtgacggctgcccatctctttcacgctgcgcacctgcgacaccagcacgccggactcggccaccaggaagcgcccgggctcaatctccagtttcaccgggtgccccagatgggccgcgatctgctcccgggcgcggttccacaggccataatagtgggcggtgtcgatggcctcttcaccttcgcggtaaggaatcgacagaccgccgccggcggagatggcctgcagatcctggccaaagtcgacgacctggcgcaccatcgcgccgcacacctgctccaggtgaccatagtcaacgccagagccgatatgcatatggatcccgaccagctgcagctgatagcgacgcatcacttccagcgccgccggcaggtggctgtaccagatgccatgcttgctattctcaccgccggtattggttttctggctgtggccgtggccaaagcccgggttgacgcgcagccagacgcgatggcccggcgacacctcgcccagctggctcagcatgtcgatcgagccggcgttcaccgggatctgtaacgccttcacccgatcgagggtggcgtcgtcgatcagatcggcggtgaagacgatatcctcgggattctgctgcggatcgtagcctgccgccagcgcccgctcgatctcccccagcgacaccgagtccaccttcaccccctgctcacgcatcagacgcagaatatgaatgttagagcaggctttttgcgcaaaacgcaccacgtcgaactggctgagctgggctatctggcggcgaataatctgcgcatcatagacccagaccgggcagccaaattccgccggcaggcgcagcaggttgtccgcggtcaggtcagtatcggtggcgtaaagcgagtgtggcataagaactccggtgcagtgcgtgtgttggtcgctgttttttctgattacgccacagtgacagacgaataaaaaatatcgttttatcgcgactctatgcaaaaatgatatggttccagccgagcctcacggagaccgcatgccagccgtcaatttgcgtcatatcgaaatctttcacgcggtgatgaccaccggcaacctgaccgaagcggcgcggatgctgcacacctcgcaacccaccgtcagtcgcgagctggcgcgctttgagaaggtgctcggcctgcagctgtttgagcggacccgcggtcgcctgcagccgacggtgcagggcctgcgtttgtttgaggaggttcagcgctcctggtatggcctggaccgtatcgtcagcgccgccgagagcctgcgcgagttccgccagggcgagctgtcgatcgcctgtctgccggtgttttcccagtcctttctgccgctgctgttgccgccgtttctctctcgctatccggaggtcagcctgcagatcgtcccccaggagtcgccgctgctggaggagtggctctccgcccagcgccatgaccttggcctgacggagaccctgcatacccccgcgggcaccgaacgcaccccgctgctgacgctgaatgaagtctgcgtgctgcccgccggccatccgctggcggcgcaggcgacgctgacccccgccgattttcagggcgaaaactacatcagcctgtcgcgcaccgacagctatcgccagctgctcgacgccctgttccttgagcatcaggttaaacggcggatggtggtcgaaacccacagcgcggcctcgatctgcgccatggtgcgcgccggcgccgggatctcggtggtgaatccgttaaccgccctggactatgccgatagcggcgtggtggtgcgccgcttcagcgtcgaggtgccgtttaccgtcagcctgatccgccctctccaccgcccgcgctcggcgctggtcgacgcctttgttgcccacctgcagcagagtctgccgcagatcctcacgccgctggcgtcggtcctgcagagagcataaagttgaccgcgtcttccgcgtggatcgccgcggtgtcaaagaccggcagcgggctgagctcggcaggcaccagcaggccaatctccgtacagccgaaaataaccccttccgccccctgctccgccagggcggcgatcgtctgcagataataatcccgcgacgcctcgctgaaggtgccgagacaaagttcgtcgaagatgatctgattgatctgcgcccgatcgtcagcctcagggatcagcgtctcgatggcaaactgctcctgcagacgaccgcggtaaaaggtctgctccatggtatagcgggtgcccagcagcgcgacccggcgctgacctttggcggcaatcgcccgtccggtggcatcggcaatatgcaggaagggaacctggcagcgggcggcgatggcatctgcgactttatgcatagtgttggtgcacaggacaatgccttcggcccccgcctgctgcagcccgaccgcggcctcagcaaggatctccccggcgcgatcccagtcgccggcggactggcaggcttcgatgtcgtgaaaatcgacgctgtgcagcaccaggctggcagagtgcaggccgcccagtcgcgccttaacgccctcattgatcaaccgataataggggatcgtggactcccagctcatgccgcctaacaggccaatggttttcatcttctgctccttatgtcgtttctgccagtgaagcaaacttgtgatcaactttccacttctctggccgcgtatttctttttcatgaagagtgggataagttaaatgaaacaatgtttcactttaacaacaggatcgcccgatgtttatttttcataaagacaccacccttgaagacctcggcaatggcgtaacccgccgcattctggcccacgacggcaaaatgatggccgtggaggtgaattttgccgccggcgccgtcggcccgatgcataaccatcctcacgaacagctcacctatgtgctttccggcgagttcgagttcaccatcggcgaggagacgcgcgtcgtcagcgccggcgatacgttgtataagcggccggggattatgcacggttgcgtctgcctgcagcccggcacgctgctcgatacctttactcccattcgcgaagattttcttgaaggctaatccataacgggggcgttcgccgtccccggttactgcccggcgcccttcaataaaaagatgctgtcacaatcattatcctggtaataatatttcccgctcagttaagcctaatttttcattcctttcaggcgccctttacggccaaaatgcttaccatctcacctttttgaaacatcgtttcgactttgatcacatttccatcctgatctgcatgacgcagaaacaaatcgcaataaaatgaaattaaaacggtgttttataaaaaacagttcagcataaaaaaaggggctgtcagcccttacctgctagaccagttaaagaataacccattaattaacaaggacatgttaagcagaggaagcgttcagacatttttgcgttgtcaggcgtaaaaggccgacagcgcggcgtcaccggatccgtattacaactcgtaagccaggtaggtatgtatgaatgaaaacaagctgctgggattggcatggatatcgccctatatcatcgggctgatcgtctttaccgcttttccctttgtttcatctttctttctcagttttaccgagtacgacttgatgagcccgccggtatttaacggcatcgaaaactatcgctatatgttgaccgaggatagcctgttctggaaatcgatgggggtgacctttgcctacgtctttttaaccatccccttaaaactggctttcgccctcggcattgcttttgtgctcaatttcaaactgcgcggcatcggctttttccgcaccgcctattacatcccgtcgatccttggcagctcggtggcgattgccgtgctgtggcgcgccctgttcgccattgacggcctgctgaacagttttctcgccgtctttggcattgatgccatcaactggctgggggaaccctccctggcgctgatgtcggtcaccctgctgcgcgtctggcagtttggctccgcgatggtcatcttcctcgccgcgctgcagaacgttccgcagtcgcagtatgaggcggcaatgattgacggcgcctcaaagtggcagatgttcatgaaggtcaccgtgccgctgatcaccccggtgattttcttcaactttattatgcagaccacccaggcgttccaggagtttaccggcccgtacgtgataaccggcggcggtccgacctattacacctacctgttctcactctatatctacgataccgcctttaagtacttcgacatgggctatggcgccgcgctggcgtgggtgctgttcctcgtcgtggcggtctttgcgtcgatcgcctttaagtcatcgaaatactgggtcttctactccgccgataagggaggcaaaaatggctgatattcaacagatggcgccggtgatgagcgacgccgatcgtgaggtcgcccgtacgctgcgccgggaaaaggtgagccgggtggtgcgctacgtcgtgctgatattcgtcggcctgctgatgctctacccgctggcgtggatgttctccgcctcgttcaagccgaaccatgagatcttcaccaccctcgggctgtggcctgcccacgccacctgggacgggtttatcaacggctggaagaccggcaccgaataccatttcggccactatatgctgaacacctttaagtatgtgatcccgaaagtggtgttaacgatcatttcctccaccatcgtggcgtacggcttcgcacgctttgagatcccgtggaagaagttctggttcgcaacgcttatcaccaccatgctgctgccgagcaccgtcctgctgatcccgcagtacctgatgttccgcgaaatggggatgctgaacagctatctgccgctgtacctgccgctggccttcgccacccagggattcttcgtcttcatgctgatccagtttctgcgcggcgtgccgcgcgatatggaagaggcggcgcagatcgacggctgcaactccatccaggtgctgtggtatgtggtggtgccgatcctcaagccggccattatctcggtggcgctgttccagtttatgtggtcgatgaacgactttatcggtccgctgatctacgtctacagcgtcgataagtatcccatcgcgctggcgctaaaaatgtctatcgacgtcacggaaggcgcgccgtggaacgaaattctggcaatggcgagcatctccattctgccgtccatcattgtcttcttcctggctcaacgctacttcgtgcagggcgtgaccagcagcggaatcaaaggttaagagggaaatatcatggctgaagtgattttcaacaaactggaaaaagtctactccaacgggtttaaagcggtgcatggtatcgacctgaagattgccgatggcgaatttatggtgatcgtcggcccctccggctgcgccaaatcgaccaccctgcgcatgctggcgggtctggagaccatcagcggcggcgaggtgcggattggggacaaaatcgtcaacaacctggcgcctaaatcccgtggcatcgcgatggtgttccagaactacgccctctatccgcatatgacggtgcgcgaaaacctcgcctttggcctcaaactaagcaagctgccgaaggcgcaaatcgacagacaggtggaagaagcggcgaaaattctcgaactggaagaactgctcgatcgcctgccgcgccagctctccggcggccaggcgcagcgcgtggcggtgggccgggcgatcgtcaaaaaaccggacgtcttcctgttcgacgaaccgctctccaaccttgacgccaagctgcgcgcctcgatgcggatccgcatttccgatctgcataagcagttgaaaaaatctggcaaaccggcgaccaccgtctacgtcacccacgatcagacggaagcgatgaccatgggcgaccgcatctgcgtgatgaagctcggccacattatgcaggttgataccccggacaatctctaccaccagccgaaaaatatgtttgtcgccgggtttatcggcgcgccggagatgaatattcgtcccagccagctggttgagcacggtggtcgcctgtatttgacgctgggcgatcagcggctgccgctcaacgatcggctgcaaagcaaagttgaaacccataagaatcagcaggtgttctttggcgtgcgcccggagtttgtctctctctccgatgaaccgtttgccgaaggttcctgcgcgggtgaaatggtacgcgtagaaaacatgggacatgaattctttgtttatctcagggttgctgattatgagctgaccgcccgcgtgccgtcggacgatgcgaagccgatgattgccaagggactgaatcgcaaagtctatttcacctttgatctcaacaagtgtcacatctttgacgccaaaaccgaacagaacctctctctgtgaaccctggagcataacaatgaaaaacgtgctgataagcgccaccctctccgccaccctgggccttagcgccttctcttcgctagcgcaggatgtcgacctgcgtatgtcctggtgggggggcaacggccgccatcaggtcaccctcaaggcgctggaggaattccacaaacaaaacccagacatcaacgtcaaagcagaatacaccggctgggacggccatctttcacgcctgaccacccagattgccggcggtaccgagcctgacgtgatgcagaccaactggaactggctgccgatcttttcgaaaaatggcgatggcttttacgatctgaataccctgaaagacgagatcgacctcagccagttcgacgccaaagaactgcagtccaccacggtcaacggcaagcttaacggtattccaatttccgtcaccgcccgcgtcttctactttaacgacgaagcatggaaaaaggcgggcatccccttcccgaaaacctgggatgaactcatggcggcgggaaaaactttcgaaagcaagctcgggaaacagtactacccggtggtgctcgaacaccaggacgtgctggccctgctcaactcttatatggtgcaaaaatacaatcagccggccatcgatgagaaagggcgaaaattctcctacagcaaagcgcagtgggcggatttcttcggtatgtataagaagcttatcgacagccatgtgatgccggacacccgctactatgcctccttcggcaagagcaacatgtacgaaatgaagccgtggatccagggcgaatggggcgggacctacatgtggaactccaccatcaacaaatattccgataacctgaagccgccggcgaagctggtgctgggggaatacccgatgctgccgggcgccaccgatgccggactgttcttcaagcccgcgcaaatgttatcgattggcaaatcgacgaaaaacccgcaggcggcggcgaaagtgattaacttcctgctgaacagcaaagaaggggtggatattcttggactggagcgcggcgtgccgctgagtaaagcggcggtcacctacctgaccgaggatggggtaatcaaagccgacgatccggcggtgtccggcctgaagctggcgcaatccctgcccaccgctctgccggtctccccgtacttcgacgatccgcagatcgtcgcccagttcggcaccaccctgcagtacatcgactacggtaaaaagtcggtggaagaagcggccgaggacttccagcgccagaccgaccgcattctgcgccgcgcgatgcgctaacctgcccgtctgaactctcccgcggcgcacgccgcgggagggtctgccagacggccctgtcagaagaaatatttaaagcgcacccgggcgccgtagcgttcatcgggattcccgctcttcgctgccgtggaatcgagccacgaggcataggcgccaaggtaaatattgaagttcggcatcgccatgatattcggcaactgccaggaggtgtgcaaggtatggatgtcatagcgccccggcgccaggatagcgcaatcgccatcgcattcgctggtcaccccggccatattgaactggtcgattttattgtgcgcatagatatagcccagctccacgcgatgccaaagggcgttgatcccggcgctgaagtcggtttcgtccgccgcgtccagcagggcggtactcagattgaccaccgccccatcctgcggatcgcttttcagggtgttccagctcatggtcagcccgtagccggtgcggtttgactggtcgacccagcgtccgctctggctctgatagccgtaagcattgttgacgagattgctctctatcgccgcggccgccgaccagacgccggactgccatgccgccaccggccgcacgtacaccacatttttgcggttttccagcgcgttaccatgatagttctgatcgacaaacagcgaactgccgtcctccaccagggtgttaacttcgaaataccagttatccaccgttttgctaaacagaaggttaccgccgctgctgctgcgcccgcgcccctctttcatcatgtaaatatagccatagccatcggaatagagatcgttggcggtattacctgaatattcaataaaggtatcctgattcagcgggaacatatcccaggcttcaaagcggcctatttttattttccagtcatcctgctggccgaagaaaaataccgcatcatcaagattcattttgccatccatatccgccagaggctgcacgctgaatccggcatattgcccgtcggcgccattccgtctgccatcgaaacccagcagaatacgaccgttaatatcccagcgctctttatcgccgggcgcccagcttttattcgcgctggttttgaccgacgtcaggctgccggtgcgactggcgccatcgaggttaaattcgacgtcgccataaaattttaattcgccattgtcatttagctgcaaacgcggcgaagcaggcgccgcgcgggcgaccgtcgcggcctgctgctggcctttcagcgtcttaatttccgcctctgcgctggcggcgcgcgcctccgtcgcctttagccgctgctccatttgcgccagtcgctcctccagcgataacggcgcctgcgccataacggatggcagatacagagacgtcagaaaacacccgacccagattttattcatcggtaaacccttttattatggaatgaactgaattttttattaatgggtaacgcacgacgatgcaggcaataataacccgcccatcgtcaaagacgggttattaacgacaacagccttattattattcgagctgccaggcgccggcttcggttaatgccgccgagccgctccaggcaaataacgctaattcacggcggggagcctgcggatagatacggctgctcaggcaagcttcgccgtcattgacaaaaacctccaccgaagagctatcgaaaaatattcgcaggttgagatccgccccggcggtcaacggcacgctgcgcgtcccgcacaggccatactgcggataatgccgctccagcaccagacgctgctgttgggcatccacgtagatgcgcaggccatcgccaaagcgcagaccatactgctcggcgctgctgcgggcgcagtcccagcgcagattcacctccatcgcctcgcagttgtcgaccatcgtcgtctgctggttgttcagggtgctgaccggccacgggaaccaggcgccgcgcaggctctccacttctttcgccgggcgcatctgcaggcggtcatccgcgctcaggctcagctcgcgcggcagggagagcatgcccgcccagccgtcctgctgctccggcagcggcgattcccacatatccagccagccaatcacgatccgccggccatcgggggtggagaagctttgcggggcatagaaatcgtggccgttatccatctcccggaattcgccatggcgaataaaacgctggcctggctgccactcgccgatcagatagccgctctggaacagattgcggttgctgaaccccgcggcctgcatcccctgtggggaaaacatcagaacgcgtttgccgttgagggtgaagaagtccgggcactcccacatatagcccatggtgctttccgcttcatccagcacccccgcgtcctgccactggcgcagatcggctgaacggtacagccgcacctggccggtatcgccttcgcgcgcgccgacgatcatgtaccagctgtctccttcacgccagaccttcgggtcacggaagtggtgcatacccggcggggtgtcgaccaccatcccctggcgctcaaagtggatcccgtcgcggctagtggccagacactgcacctgatacagattggcttcgtcgccaggatcgccgtggaacttatgcccggtgtaaatcagcgccagggtatcgccatcgaccaccgccgagccggagaagcagccgtctttatcctccgggccctccggcgccagggctaccggcaaatgctcccagtgcaccagatccttactgcgcgcgtgcccccagtgcatcggtccccactgggtggagtacgggtgatgttgataaaaggcatggtaccagccgtcgaaccacaccagaccgtttgggtcgttgatccacccggcgcgggccgccaggtgatagtgcggataccagcgcagattcagcgcctggcgttgtgtctggagtacctgttcagcccgggagattgtgtaagtcatcattttcactctttttgattcagatagcggtaggttgcgacaccagcggatcggcggaggatttgccggagcgcaacaagaagatggaaataaaggtggtgcagaacaccagcaggcccatgattaggtaggactgggcgaagccatatttttcatagctgtagcccgccagcggcgacaatacgctggcgataatcgagctggtgcaggcgaagcccaccagatagagggtggaggagagacgtttatcgaagttgaggctgttgtacttaaagatagccaccagcagtatcggcaactccaccgcgtgcagcagtttggtgatggagatcagcagcggcccctccaccagaccggaggccaccatgcgcatcgccatcaccatgccggcgaaaatcagaccgtttttggcgccgatgcggttcaccagccacggcgcgcagaacatgccggccgcctcgaggaacacctggaaggagttgaggtagccatacatctcattgccttcctgcagggtcgcgaactgcgatgagaaatagaccgggaactgctggtcatagacgccgtaaatgcaggtgccgatgacgaagaagaccagcgcccaaaagcgcggcagcgtcagcaggcgcagcgcatcttcgagggtcaccttaccgcccgataccgcctcctgcatcgcatgcggcgccgaggagacccgcagccgcgccaacaggataaagaacaccagcccggaacagctggcgacgaggaagtttagctgcggattgatgttaaacagcaggccggcgaagaaggtggccaccgcccagcccagcgagccccacatccgcgccctgccgaattcaaactggctctgacgcgccaccctctcggtgtaagattccagcacgccgatgccgccgttaaaggtcaaaccgatatagatcccgccaaagatgctgcccaacaggacgttgattttcagcaggtggccgaacagcagatacgccggaccagagaggatcagcagcgcggtgatataccagagcagatgtttgcgcagccccagcttgtcctggataaatccatagcaaacttgcgcaaacagcgcggaaaccgacagtacggcatagataataccggtatcgccagccttcagcccaacctcctggtgaagccagatagagagcaaggagccggatgacgaccaggtcacgaaaaagaaaaacagtaaggcactgagcaacgggtagctgtgtgagtgaggcgctttcatcatgacattctcgtgttagaggaatgcaattatggtaacgttaacaaaaaacaaaacgcaggtggattcgctgcgatatatgatgttaatcacaaaagttaacgttaacataatgaagatgcgatcgcgatcaaaaatcaaccgcaacatagctcacgatggcgatagcagaaaatcgtttcactcttttacatcagcgacttagttgtatagcctgtactctgcggcaatggcggaggaaaaaatggcgtccctgaaagatgtagcaaaactggcgaatgtatctctgatgaccgtctcacgggcgctgaacaccccggagcggctgaagcctgagacactggcccgcgtgcaggccgccatcgccgaaaccaactacgtccccgacctgtcggcgaagaagatccgcggggcgcgcgcaacccccagcaccatcggcgtgctggcgctggataccgtgaccacgcccttttcggtggagatcaccttatcgatcgaagagacggcccgcgcccacggctggaatagctttgtggtcaatatgttttctgacgatcgtccggaagcggtggtcgacctgctcctctcccaccgtccggacggcattatctttaccaccatgggcctgcgccaggtaccactgccggaaaaactgctgactctgccctgcgtgctggccaactgcgaaagcctcagccagccggtggccagctatatcccggacgatgaacaggggcagtacgacgcggtgaaagccctgcttgccgctggctatcgtcgtccgctgtgcctgcacttacccgccagccagccggcgacgatccgccgccgcctggggctggagcgcgcctgccgggaggccggtatcgaaccggaccatctgagccattcgtatatgggccagggcgatgagcattaccacgatatcccggcggtggtgctggcgcatatccgcgagggtaaacctggctttgactcagtgatctgcggcaacgatcgcatcgcgtttatggtctatcagacgctgctgggccaggggttacgcattccacaggacgtggcggtagtgggatacgacaacatggtgggcattggcgatctgtttctaccgccgctctccacagtgcaattgccgcattatgacatcgggcgcctgagcgccctgcatatcattcacggcgacaaccatcgggagacgcgcaaagtcgccagcccgtggttgccgcgcgcctcacattaacgattaccgatgttgcgcagcttctcgcccgccatcaggttgcgctcaatgtgctcgagggtgacattcttggtttccgggatcagccagaaggtgatgccgataaaggccacgttgagcgccgtgtagagccagaaggtgccggcggcgccaatcgcgtcaagcagcgtcaggaaagtggcgccgatgatcatgttcgacacccagttggtggtggtcgagcaggtgataccgaagtcgcggcattttagcggctggatctcggagcagaggatccacaccaccggcgccgcgctcatcgcatacccggcaatacacatcatggtcatgccgacggagagccaggagaggccgctggatgcggtgccattgtcgaactgcatcaggcagtagcccagcaccagagtgcccagcgccatcacgctaaagccgattttcagcgctggcttgcggcccgctttatccactgtgaacaccgcaataaaggtggcaaacataaaggtcaggcccaccaccagggtggcgatcatctgctgttcagtagtggtaaagcccgccattttaaagatacgcggcgcatagtacatgatgatgttcatgccggtgaattgctgcatcgcctgcagcagcatgcccaggaacaccgcccggcgcacgttacgattgaccttaaacaacgcccaaccgccctgcttcagcttgaggctctcacggatctcgttaagctcgtcgcgcgccttttccgaagtatcgcgcagcatccgcagcacttcttccgcttcgatatggcgtcccttctccgccagccagcgcgggctgttcggcaaaaagacgaccagaatgatcagaatcaccgccggcagcgccagcacgcccagcatggcgcgccagttaccgctgtagctaaaggcggtatcggaaagaaacgccagcacaatgccaagggtgaccatcagctgatacatactgatcattttcccgcgcacgttctcgctggccatctcggagaggtacagcggcgcggtataagaggcaatcccgactgccacgcccagcaccacgcgggccaccagcagcacctccacgctggcggcaaaagcggatccgatagagccggccacaaagagtacggcccccgccatcaggctgtatttacgaccaaggcggaacgacagccagccgttaaacagcgcgcctatcgccgcccccaacatcatgctgctaaccacccactcctgaagctggctggataaggtgaaatggtcggttataaagggcaacgctccggatatcacgccgatatccaggccaaagagcaagcccgccaccgccgcggcgatggaaacaaaccagttcatccgccgggtatcacgttgcgtccgcggcgataatgtagagtcgttactgattgaagtcatttttttcctgccacacagagtaagacataagacgaaagtacgtgactggtggatgaatgggtcaggcaggataagccaaagatatggactatattgctggcaggatgggttttgtgatggacattaaactttcaaagtaacaaaaaatgcgtttccaatagttaataaccctgtttatacagagcggtaacattatacccgtattccggagtatggacgatccgcacttttgcgtatggacaataattgctcagatggccggagcgatacgacagaccccggccatcgcggacggttagcgcgccagccagccgccgtccaccgccaccgtgtagccattgatgtaatcggaggctgaggaggcaaggaacacgactggccccatcagatcggccggtagcccccagcgcccggcgggaatgcgatcgaggatttcgctgctacgctgctcgtcggcgcgcagctgctgggtgttgttggtcgccatataccccggggcgatggcgttgacgttgatgttgtgtttggcccactcgttggccagcaggcgggtgacgcccatcaccgcgcttttggatgcggtatacgacggcacgcggatccccccctggaacgacagcatggaggcgatgttaatgatcttcccgccgctgccctgggcgataaagtgtttcgccgccgcctgggacataaaaaatacgctcttgatgttgaggttcatcacgtcgtcccagtctttttcgctgaacgccagcgcgtcctcgcggcgaatcaggccggcattgttgaccagaatatcaatatggccgaactccgccaccgcccgctccagaagctgaggaataccgtcgatctggcgcaggtcggcggtcaggctgagaaaacggcgtcccagcgcggttacccgctcgatagtctccaccggttcgacgatattgataccgacaatatcgcagcccgcttccgccagcccgagggccatcccctgacctaaaccggtatcgcatccgctcacgacggccacttttccctgcagggagaatgcatcaagaatcatattatgttccttagtcgttcagagcctgctgtttgcaggcaaggttctctcggcccggtccgcgccggcggcgcgactgagcgtggggcgaactctcgggcatagcccaccataatgaaaataaaacagagttccgttttgctgatgggtgccatcttagccccgcccccagccattttcaatattatttaaaacgatgtttcattttttatgatgacgattacaaaaaaagaaaaagcgaaggagcctcccggcacgcgccaggccggaaaaggttttgaaaagatgaagattctaccgattgtctgcagaggtgccgaagcgaagccagcagcccgctgaaaacgcgggaattacgctgaactgcgtgagccatcacaaataatgaaacaatgttttgataaattaatacctgtcttttaaaacatatcactcagcgacacgcctctggtccagcggcatcgcaggaaagaaaggagcactacatggctaaaggcatgcgggtcaaactgaattatcacgtcagccacgatccggataccggggcggaagtcacccgcttaacccccccggaggtcacctgtcatcgcaactacttctatcagaagtgcttttttaacgatggcagccatttactgttcgccggcgagtttgacggccactggaactactatctgctgaatatcgccagcgccgaggccgtccagctaaccgaaggcgccggggataacaccttcggcggcttcctctccccggacgataagtcgctttattacgtgaaaaatgaccgtatcctgctggaagtcaacctgaccaccctcgccgagcgcgaagtttatcgcgttagcgatgactgggtagggtatggcacctgggtggcaaacagcgattgcagcaaactggtgggcattgagattgccaaaagcgactggacgccactcaacgactggcagattttccatgatttcttccataaaggaccgcactgccgcctgctgcgcgtcgacctgcgcagcggtgcgagccaggtgatccatgaggaaaaaatctggctgggacacccgatctatcgccccttcgacgaccataccgtcgccttctgccatgaagggccgcacgatctggtggacgcccgcatgtggctggtcaacgaggatggcagccatgttcgcaaagtcaaagcgcatgctccaggcgaaagctgtactcatgaattttgggtgccggacggttcggcgctgatctacgtctcctatctgaaaggccagcaggggcggacgatctatcgctttgatcccgaaagcggcgtcaacgaggccctgatgacgatgccggcctgctcgcatctgatgagcaatttcgatggcacgctgctggtaggcgatggctcaggtacaccggtggatgtcaaggataccggcggctactccattgataacgatccctggctgtatgtctttaacgtggcggaaaagcgctacttccgcgtcgcgcgccatgatacctcgtgggcgacggtggccaacagccgccaggtaacgcacccgcacccctcatttaccccggacgatagcgccattctgttcagctccgataaagacggtaaaccggccatctatatcgcgaaattacccgcgcacccgtcaatgctgagcgcctgatccacgccacacttttttctgtaactggccttgccctccttcatggagggctttttttgtcccttctctttcccccataaaaaaaccccggctgacggcgccggggaaaacaaacgatgagggatgaatggtcggtcagaacgagtaggccaccccaacgcggaagcgggtctggcgatcgctgcggtcattgaccccgacgttgccaatttcgccatacggcgaccagttattatccagcttataggccaccttcacgttatattcctgcgagtagggtttattgtcgttgcggctgaccccttccgagctgcgggcatagacatagttcagctctgtacgccagtcgccgaggacaaatccggcccacgcgtcgccgcggttaactttgtcatcatctttgccggcgttgttcggatagcgggtgtattcatagcgatagcgagcggcgacatagaagccgttgtcgaaactgtactgcgcgtgcaggtgcggcttgtagatggagcggctgtcgttgctctcaatggtaaacccgggggtgaggaacaagttcgacgtcgctttccagcgccagctgatggtgtcttcatgaccattgcccaccacgtccgaatagggttgcgaaccgttgtcgccgcctgagcgccatttggcctcgacggtaaagcctaagccgttggcaaagcggtgagaaacggagacgcggtcagcattacttttatcactctttccgccatcaataaattcatgacgtaaatctatcgttaccgcggttgctgcaaaagacataccgcagagggcggcgagaaccagagagcgttttaacatagggtacccttacaataaataaaatgacatttcgtttttatgaaacatcattttattttttaggcaccatagttttagtgaccaggatcgtagttatttgtttcaaaaaaggtggcacaacaagacgtgacgaagctcaataatttcgccggggagagtgaaagagggagggaaaaataagggttcggcaaagcacggcgcataaaaaaggcctcccgcaggaggccatggaaatcgaggtatagcgctatgcgcgttctaccgccagcgccacgccctgaccgccgccaatgcacagcgtcgccagacctttgcgggcatcgcgcttgatcatttcatgcaccagcgacaccagaatccggcagccggaggcgccgatggggtggccgagggcgatcgcgccgccgttgacgttgacccggcgctcatcccactccagtacccggccaaccgagatcgcctgagcggcaaaggcctcattggcttcgatcagatcgacgtcgtccagccgccagccggcccgctccagacagcgacgggtggcatgcaccggggcaatgcccatcagcgccggatcgacgccgacgctggcgaaggcgcggatccgcgcaaggatcggcagccccagctccagcgctttagcctcgctcatcatcattaccgccgccgcgccgtcattgatgcttgaggcgttgccggcggttaccgatccaaggcgatcgaaggtgggctgcaggctggccagcccttccgcgctggcatccacccgcggttgttcatcggtatccacggtgcgcgccgcgccgttatgctcggtgacaaccgggacgatctcatcgcgaaagcgaccggaatcaatcgccttgcgcgccttatgctgtgagctgagcgcccaggcgtcctgcagctcgcgactgatgccaaattcccgggccaggttttccgccgtgacgcccatatgataatcgttgaaagcatcccacagcccatcatgcaccagactgtcaatcagctgggcgccggtgcggctgtcggtaagcacatgcggagcgcggctcatattctcctggccgccagcgatcaccacgtccgcttccccgcactggatcgcctgggtagcgaggtgcagagccttcaggccggaaccgcagacatcgttaatggtgatagccgatacggtgttaggcagcccaccgcgaatagcggactgacgcgccggattttgtccggtccccgcggtcagcacctggccgaggatcacctcatccacgctgtgcggatcgattcccgtcttctccaccagcgccttcaccaccacgctccccagctcgacggctgaatggcgcgataatgcgccctgaaagcagccaatcggcgttcgcagcgcgccgacgatcacgacatccttcatcctctacccctgcccatgcatttgcgcaaagaaacagcgatatactagataattgttatcaaaaaactttgtaattgtttaaaaaaagtgaagccaatcacaaagaaatagctattcgttaacgttcacgccgctgcagatgctgacgcagccagctgccggccgctcccggcggcgctttcttattccacagcagatcgactgaaatcgcccgcggccagccggggatatcgagcgccaccagcccgccctgcggcgcaaactccgccaccagcgcgctgggcagaatgcaccagccgaacccctgcgccgccatgctgagcagcagcaggtagtttggcgccgaccagacctggcctgcggcaggttcggtggcgctggccagaaaggtgctcaaacgcagctcgcgccagctgcgcagctcatcccaggcgaccttaccctgcgccgccagcggatggccaggggctacataaatgcccatcgccgtctgcagcggcaggcgggtgctgccgatatcggtggggtagcgctccctcgcctcaatcagccccacctgggcgcgggatttttgcaggagatcgatcacatcctcgtcttcgccaatcaaacactcaaactcggtatgaggaaagcggcggtcaaactgcaccagcagatcttccagcacgtccgggtgcagagtatcggagagcacgaaggtcagccgcggctccgtctcgccggacagcgacacagccagttcgtccagccgctcgctggcggcgagaatcgctttgacatagctcagcacctgctccccctgcggggtcagcgtcggttgccgcgttgccctgtcaaagaggattacgccgagatcggcctccagattggcgatggcggtactgatcgtcgactgacttttccgcagacggcgggcggcggcggagaacgatccgctgtcgaccgcctcgacaaaggcggttaaggcttccggtgaataacgcatgatgtatctacaatatcgatgggtcctatcttttgtttatcatatttttccataaactgccgggtaatttcctgttcaggctaaaactggaggtagctcgccatgcaacagaccccacatcagcgcaagacgctcaccgaacgcgttatccacgccatcaccttcgaaggactggcgacgctgatcctcgcccctaccgccgcctggctgatgcagcgctcggtagtggagatgggcggactgagcattctgctcgccaccttggcgatggtatggaacattatctataacgcggcgttcgatcgcctgtggccggtctcccgcttcccccgccagctgaaagtacgcgccctgcacgcgctcggtttcgaaaccggattcgtcatcattggcgtcaccatggtggcgatcgtgctgggcgtctcgctgctgcaggcgtttatgctggagatcggttttatgcttttcttcctgccctacaccatggcctttaactgggtatgggacaccctgcgcgagcgcgttattcgtcaccgccgcccgcgccagacggcgcgcggttaatcccggcgcggatcttcgacgatccgccgcgactttatcaccaaaaactatcgcaacagacgaaccataaatatggtaaattgcactccttttttttggtttgacggttgataaagtcgcataatgtctaaaatttggtctaaagaagaaactctatggagttttgccttatatggcactgcagtaggcgctgggacgctatttctaccgatccagctgggttcggctggcgccattgtgctgttcatcaccgcgctggtcgcctggccgctcacttactggccccacaaagcgctgagccagtttattctctcggccaatatcgcgccgggaaccgggatcaccggcgcagttaatcactactatggtaagaaaattggcaacctgatcaccggcctctatttccttgccttctttgtggtggtgctcatctacgccgtggccatcaccaactcgctggccgaacaggtggcgcatcgcacgccgatgaccccagggctgcgtgcgctgctgagtctgggggtcgtgctggtcctcaacctgatctttctcatgggacggcaggtcaccatcaaggtgatgggctttctggtcttcccgcttatcgcctgtttcctgtttctctccctctatttaatccgcgactggcatccggagcatctcaccagccagatgcagttcagcccgcagacgctccaccaggtctggatctctattcccgtgatggttttcgcttttagccatacgccgatcatctcgacttttgctatcgatcagcaggagaaacacggcgacctggccatgggtaaatgcaaaaaaatcatgaaggtggcctacaccatcatctgcgccagcgtgctgttttttgtcttcagttgtctgctggcgatcccggcaacctatatagagaccgcccgcgatcagggggtgactatcctctccgccctgtcgatggtgccaggcgcgccgggatggctggcggtgaccggcatcatcgtcgccgtcgtcgctatgtcgaagtcgtttctcggaacctacttcggagtgattgagggcgccagcgaaatcgtcaaaagctcgctgggcctgctgggcgtgcgtaagagccgcgctttcaaccgcgcgatgtcgatcctgctggtctccgccttcacttttgcggtgtgctttatcaacccgaatgcgatctcaatgatctacgctatcagcggaccgcttatcgccatgatcctgtttattatgcccacgctgtcgacatggctcattccggcgctgaagccgtaccgctcggtgggtaacgccattacgctggtggtaggcctgctctgcgtgtcggtgatgttcttcggctaatcccctctggcgacagcggctgcctgagctgctgtcgcacattctgacaatattctcccccttgccttccttgtgagcggattacacttacggcttagccaccgtgaggagagttcttatgtccagtgtcaccttatccggtcgcggcacgctcggcgatcgccaggtctatcgcttaggttatggcgcgatgcagctggccggccccggtgttttcggcccgcccaaagatcctgaagaagcggtgcgcgtactacaggccgccgtcgaggccgggataaaccatatcgatacctctgatttctacggtccacatgtcaccaatcagttgatccgcaaagcgctccacccctaccctgacgatctgtgcattgtcaccaaggtcagcgcccgccgtgacgagaaaggcaactggctaccggccatgtcgcccgccgaactgacccaggccgttgaagacaatttgcgtcacctggggcttgaggtactggaagtggttaatctgcgcagtatgctgagcccgcacggcccggtggagggttcgctggaggcgccactcgccaccctgctggaactgaaagagcgaggattaatccgccatatcggcctcagcaacgtgacggcaaagcaggtcgcggatgcgcagaaaatgacgcccatcgtctgcgtgcaaaacctttataacgttgcccatcgcgccgacgacgcgctggtggatgcgctggccgcccagcacatcgcctgggtgccctttttcccgctgggcggttttacgccgttgcaggcgcaggagttgaacgaggtcgcggcttcgcttgaggcgacgccgatgcaggtcgccctcgcctggctgctccagcgagcgccaaatattctgctgatccccggcacctcctcccgcacgcacctcgcggaaaatattgccgctgccgagctggtcctgcccgcggaagcgctgcgcaccctcgataatatcgccaccgccgcgcgccgctgacctgccagacaaaatggagggaaccctatccctcctcaatatttgcctggaaaaacctcaccgctactggcactatagatcctacaaatggggcgtgatcgacgatcgttctctcattatccccgttaattaaacttaagtttttatccttcgaccggtctccagcttggaggccgttgtcgtttttgtcatgaccaaaattcgaaactcttgattacaggaaatacaatatcaaattccaagtttatacatatcaatctggctgcaaagatagtcaataacatcaaacgctcataaaaacatctgattaacccaatcagaatgttgctattgctataagaaaaatcaaacgcctcacgacaactatttacaagggatgcatatgacagagggaacgataaagaccagtaagtatgaaattattgctattttcagagaggagttgcgcaaacgtactgaaattgaaatattttttaacaacaccagtatcataacccaactgacgcgcgtggactttgccgagtttcatattcagacccatcgcaaaatcccgtccgggcataaaattcgctttctcttgcatagcgattcagggaaaatagagtttaatgcggccctgacaaaacatgacaatagcggtgtcgataaaggtatccgctacgctttttcattgcctgaatgcctgcaggtagtgcagcgtcgccgcgatccccgctttcgtttacgccatgagcatgacttttattgccgcggccgccataaaaacggcgaaaactatcttttcgatatcaaagacatttcagatggcggttgcgcattgatgaccaaaacgccgaatcttaaatttctcagccacaacgccttactgaaaaacgccgtacttatgcttgcagaatatggcgagatcaccatcgacctggtggtcaaaaatgtcattgttatcaccctggataacgctaatgaagagagtgagagctactatcagatatcctgccagtttaagttccgccatctcgatgaccagcgcagaatagagaagatactgctggacctgatcttagaagccaagcgcaaaaagagaatctgacaaccttggacagtatattgctgtacaccaatgacaatctcattggtcactcaatctatcactaccttattgatagccatgaaaatgccacccgtctgagttatgccgatgtcatccatgagaaacatctgccactggcccagacgattattttcaatttaattaataaggatatttctgccatcagaatcgtcgatctgctgaatgcgctccgcctttccctgctgcgctgccagcagccggtgctaatggtgaaaagcgacattgtcgggctgtgcagagagttgataaactttgacaacgctatgattattagtgagaaatctccgctaactcttttttcatctatcgtccagcgcgccaaaggcgtcagcgaactgccgccgcgaggattgcgcaaacagctttcaccacgggagtgtcagatcctcgaactgctcattgccaacaataataataagcgtattgccgccctgctcggcattgctcataaaacggttcatagccaccgcatccatatcatgcaaaaactgggtattgataactcccgcactatgaatcagcgtattgccgctctccatcaatgctaaatgttctcccggtaaatcagtagcggataaagcgtacttattcgctgttgatttacatttcccgccattcccattaatcatcaggtagcctataattaatgtatcctctgcctattgtctgactaacctcgtgaagagggataatgaacactaaaatattcgaagacaacattttatctcgtaatgatatcgctgtacgctacgtctttcagaaaatgttttccccacaaggtactctggtcgcggtggaatgcttaagccgctttgataatctttctatttcccccgaagattttttccgccatgctaccgccgccgttcgtgaacgtatttttctcgaacaactggcactgattgaaaagcataaagcctggtttttacgtaaccatatttccgcaacaattaacgttgatgaccatatcctgaacctgttgcgccagaaggatataaaagccaaagtcgccgccctgacctgcgtccatttcgaggtaaccgaaaacgccgagaatctgctgcataattctcttgccgcctggcagagcccacaggatacctcactgtggctcgacgacttcggctccggctacgcgggaattaacgctattcgcggttatcactttgactatgtgaaaattgataaggattttttctggcacctgatgcgcaaagagtccggccgccagctgatggatgcgctggtgacctttttatcgcgcaaccatcataatgtgattattgaaggtgtcgaaagcgaagcccataaagaatggctgcagggaatggagtggtttgctatccagggacattactggcgggaagtcagtattgaacaactggtcgccgatgatattgccatgtaaaaaaagccgggaattcccggctttttaacgtcacttaattataaactaattcccacgttgcccagctggtaatcggcccgctggtggcgcttttcggcgttggcgaaacatagccaacgtaataggtgaacaggccgccgctgaccgcgctttcctgcaaacgcacctgattttgctgcgggtccgccgggacaattttattactcttatccagagtattattatcgttagtcgatagggccagataaatattctgcgctccatccggcaaggtattggccagatacccggcgttttcgttaccgaccgccgtcagtaaaaaaccatcgacccagcgcacgctgacccgacgcacctcatcctgcgaggctgctccaccatcatggcgcagctggcagtttgacagtgccagggtaaacggctgcggtttcataaacgccccggccccgcgatcgtggacttccgccaggctgaccggcgccagccagacattaccgctgccggcatgctggccgccgtttagcgcgacgctacaggaaatatccgtcacccgcccggcaaaatcgacccgtccgcgatcgtaattggtctcaaaaccccacgccgagggggcggcgaggctgccgcaaaatagcagccacgcgatagtgtttttcggcaatcccttcattccccctcccgtattaatcgtacgtcaggttaaagatcatatgcgactccacctcgccggtgctggtcgtcgggccatactgataaaaacgcgcgtgcagcggtatggtgatgtagcgggtctcctgattattcaagcggccgacggtgtatttcttattaaactgcagcggggagccatccttcagcacctggatgccaatgcctttcgccatcccgctgccggctttttcattcagcaaggcgcccatggtagcggtagtgcttgtggcaagggtaccggagaacgaggtgctaatgttggcatatcccgtttcactcaggccgccgctgcactgcaggtcgatattaaaatccttcccgccggcggtggtgccgacccctttcaggtcggtgcgccggatggaacccacatcgacattcatatttttcccgctcagcaccgaacaggagggcgagaccacggtgatggcgttggcgctcagataggtttcgaggatcgggttaccgccgctctcccagtcgtaggaggtgtacttacccgccgccagggtgccgctgccggtggttgccgcggttttgataatctgcagcgtaaagcgcgacccttcgagggaatagttggtggtgttatatacccgggacgaaaagacgtcgggatagacgatatttaccgttgcgccgccgcggctgaaacgcatgccgattcccggcacgttggtggagtagattttatttccaaggtccgtggcccctggcgacacgatcttcgccgcaaagcggttggtgccggaagtacagcgatagcttgccccgccgggagcgctcatcgtccagtcgcgggtaaggatcaccgagcccaccggcagatccgggggcaccaccaccctgcccaccaccatgtccagcatcaccgttggcgatgagagacgcgtacaggaggcccaggacgaggtggttcccagcgccattaagacgataaaaagcgttagtaatttcctcagcgacatacgctatcctttgttgtttgctgtcccagatccaccgaacactgcccgccgctccacttcacaatcgcgcgtttggcgttcgcatcgctgataaacatcatgctgccctggccgacaacgccgatctccttgccgtcgggggagaaaatacttgccgcaaacggcaacggctcgtggttcgcctggcgcgcctgcagggtgaggttgttctgcaccttagtgccgaacgcgaccttaaccacgctgccttcccacggcacaacctgcgccacggtgcgatcgaaggccacgtcgtcatggctgcctttcgggtcgatttccacggcgttaatccggtacgggcgcagatacggcaggatggcgtaaccattgctgtccacacgggtgcccggcgatcccggaagcatcgccccggccgcgtctttggcttcaatcagggccatcgtcgagccgctttccggtgagagcaccacgccgccgctgtgggcgatcatcgtcccgctggcgccaatgccgctctgacgatagccttcgccctggctgtagctgccgttgagggtggtccatggcgtacggtagctgccgttgagcgccacatcatgctgaccgccggtggcggtggtggtcgacacgccgtagttaaggttgttttcactgtccagcgaaccgttgataccaatctgcgagctggcaaagcgcgagttattgaacgaggtgttcgacgtcaggttggcggtgcggttatcgccaaaccacagcgggtagctgaagttgagtgaaatacgatcgtcgcgacgatgaccggagctgtctggcgtatagacgcgctgcgcgctcgccgaccaggagagacgaccaaatgaattgttgtagctgacctgatactgcttctcggtcccggagcggttccagtaatcggagatacggccgctgagataaaacccgccccagccgtccggcaggttctggttcaccgtgaaggtcatgccgtttttttgccgccacagggtgtagttgctgcgactatttttttcctgatcgacggcgtacagcgcgtcgttgaggttgtaataacctttcgtcgagtagcgatacgccgccaacacgatgctggtctgggtatcggtaaacatgcggttaaaggtcgcgcgatagctctgacccgagtcatcatgggcatcgctcttcaaccgcgaatgggtgacgtcaaaagagagcgcgccgatgccggtgttcatcccggtccccaccaggaaggcctgatagtcgtcaaaaccggtgaccccggtgtagccggtcaacaggttgttgatcccgtgctgccaggtcgcctgatagagcatcggcttgttgcgcagcgcgctgtcgtccactttaccggcggagagcgcgtagcgggtcatgcccgggcgcagcagctgggcgacggaggcgtaaggcacgctaaacacttctaccgagccatccgcttctttcaccgagacctcaagatcgctgccatagccggaaggatagacatcctgcagggtaaacggtccgggcggaacggtggtctgatagataatattgctgccctggcgcacggtgacgagggcgttgctctgcgccacgccgcgaatttccggagcatacgagcgcatgccgtccgggaacatattgtcatcggtggaaagattaaccccgcgcagaccgatggtgtcgaaaaattcaccattggtgaaaatctgcccgccgctgacgatggagttgagctgtgggatagggcgctggagataggtctggttgctgttccagtgcgctttaccctgctgctgctgccagttcaggttgccgatgtgcttcagcagccagccgtcccacgacagtccggcgttgacgcccagataggcgctgctgttatccgacccgcctaccgaagaggtatggctgttccaggcgttcgccatccagccaagattgagcgcggtaatacctttgtcccagaactccgggctgacatagtttttcaggcgttgatcttcatagatctgcggtaccgaaatgttcaaccgcagggaggactggaccaggttgtctttgacgttttcttcgttgcgccaggatttgaggctaccgcagtagccctcctgctcgctcagctgcggattgagcttttccgccgcgatgccatattgggccagcatcgctttggtgtagcagacgcccagccgaccatctttatcgcgcgcgatgcgtaaatcgtagcgccctttccactcgtcgttggtgtagacgtcaagggagtaagtgccttcggtaatcgcgctggtcgaaaagcgcgacagatcgaccttttcgcgactgccgacaataaagccgtcgttaaactgatataccgttcccgggttttcctgtccgctggaaaatggcggaaagcagcacagcgcgatggcgatcgcggtgcttaatcttcccgggcagaatgacctctgcttcattagcttttcccttatttaacggccactttcactgcgacatcggcgccatagtcattaatgttgttaacggtcagggtttcgccgcggttgacggcggaggagagcgccaccgtctggctggactgcggcgccagcatcacggttttgctgttcagggctttaccgccgtcgcgggaaatacggctgacggtaatgtagaacggcgtcgggttgttgatggcgagactactgccgctggcggtcagggtcagcttctcggccgccgcatcgcggttgcccagtccggcaggacgataaataaatttaaagcgcgaacggatcgccagctgcagcacgttctggccttcatttttctgattggccaccaccggcggaatttccagcagattcagccaccacagcgtctctttatctttcgccagaccggcgctgctgccgagcttaatacgcagcgtctggccgctcttggcgtcaacgcgcgaaatcggcggggtgataataaacggggtggtaatggtatccggtgtggcatcggcatcgccgttatccagccaggcctgcgccagcgccggacggtcggcgttatttgaaagctgtaccgttatttctttttcatttcctggataaataaagcgggtaccgttaacaataatattgttggcatgggccgcaaaactaaaaatgaaacagaaaaaaagggcaatacgcttcatgctgacctcagaataaaaatacaagcggcggacattgccgctttattattgttattaactgccccatcgcggggcagttttattttctgacggaattactggtaagtaatttcgtaagtcgcgtagctgttaaccacaccggtggttaccgtggtcggcgcgctggtggcgtagcctacgtagtaggtgaaacgcgcgccatcagctacagcggaagcgtcgcctttcgctttcggctgagtgctgtcacccgggatgattttgttggtcagcgcggtagcgttgtcagtagacagcaccagctggatgttctgagcaccggaagcttcggtgttcgccaggtagccctgttgtttgctggttgcgccagccagcaggttaccgccggtccagttcacgcccagtttgcttacgtcatcctgtttagtgccatcagcagcctggcagttagagacgtcaatggtgaaagatttcggtttcaggtaagtatccgctgctgccgctttaacttcagtcagggttaccggagacaggtaaacgttcgcatcgctgccctggccgttaacggaaacagtacaggatacatcggtaactttaccgaagaaattaacctggccgccgccaacagtggtatcagctgcatgggcagcagtcatgccaaaaaacgcggttgccattgctgcagagagaagaacctttttcattgccatttccttgtcagagtgaattacgaatcaatgagcacactgtgaattcgcatagaaccagaaacatcaggcgatgctgatttatgccactgctaatagaatcttcgactgaccgggagccgcaatatttaaggcgtcaggtaacgaacctaaaaatataagttcgctggtgctatcggcgtcaaagaatgctatttattcgccgacaaatatacatttgttcacgtttcattaagttatataacagataaccatcgactattaataaacagccattgatagatgaaaacgcgagggtggttgtttacagcgcagcaagcctaacgccagagcgagagaaagtgaccgcaacagcatgcagaaaaagccctcggaaggccatcgcgataagtctgaatctgcctttgcggtggtgaaaacagcaccaaaccattcacacaacgaatggtgaaagcatgaatgaggcgcattcctctccctgaacaagggcagcccatgtgatcccccctttcagaaacaaatcattaatccattgtttttaaactaaaaaatagataaacgatcatgtttacgccatcaaaccgccataaaaatgtgatctaaatcgcactttttgccacgcgcgttatagttagcaggcttattataagtccatcgaaagcaaacatgctttccaccataaaagttaaaaggacaaacaccatgaaaaacgtaaaattactcgccgctgccggtatgctctccctggtctctttcgctagcttcgctcatccggtgagcgtgacagcagacaccctggacagcgcagaagcgaaaatcgcaaccattgcgaaagaacaaggcgcttcctatcacattaccgaagcgtacaccggcaaccaggtccatatgaccgccgagctgtctaaataagcgaatggttgcagagggagctgccggacaggccgcctgcgggtggctggtctggctcccgccgcccaccccgcacgcagcaatgtcgagccccgttacggggcttttttcgtttttgctcccgccgcctgacgcgccagcgcgcgctggatagacagcacgctcgccagcaccacgatcaatcccatcagcgccatcccctggatcttttgtccgaggaatatccatcccagtaccacggcggtcaccgggctcagcagactcatcgccgacacggccaccggtgagaggcggccaatcccccgaaaccacaggccataggccagcatggcgcccgccaggcacagccacagatagccggccgcctgcagcactgttacctgatgcaaaggagggtcaacgatcagcgccaccggggccagcaccaccccaccgatcgtcagctgccagccggtcagcgcgacgatcggcagggagagcgcccagcgccgggagagccaggtgcccagcgccatactgatcgccccgagaaacgccgcgccgatgcccagcgggtcgagtacggtgtgcggcgacagcagcagcatggccataccgagtatgccggcgatggcggagaacaccgccagccagggcgagcgctgccggtcgacacaccaggcgaggagcatcaccagcagcggctggatcgcgccgatcaccgccgccagcccgccgggtaagcgataggcggcgataaacaacagcgcctgaaacgcgccgatatttaagatgccggtaacgatcagctttgcccattcgccgcgttgcggaaaacgacggctccagatcagcagggcgatacctgccggcagcaccctcagcagcgcagcaataaatgggcggtcagggggaagaaactgggaggtgacgatgtaggtcgtcccccagatagcgggcgccagcgcggtgagcagcaggtcgagaatcagattacgtgagagaaaagccatgattttatcttcacttcaaggtaaattagtgagtgaagtatgtaccgccaagtatcttgatatcaagacaagtgagcactaatggacaaatcaccgccgatcgacgccgtggatcgcatcctcgcccagtggcagcgggagcggccagacctcgactgcagccccatggggccgataggtcgcctgaaacgatgcgctatgctgctggagccgcaggtggaagtggcctttacgcgccacgatctggtgcgctgggagtttgacatgctggcgacgctgcggcgcgccggagcgcctttcgtactttcgcccacccagctcttctccacgctgatgattacctccggcaccatgacccatcgtctgaaggcgctggagaaacgcgggtttattacccgcctgcccaatccggaggatgcccgcagtatgctggtcgccctgacttccgccggacgcgaacggatcgatgccgcagtggaaacccacgtcgacaacgaacggcaactgctggcaggactcagtgacggtgaacgccagcagttggatcaggcgctgcgggtgttgatgcgactgctggaaacgggctaacagccagcggcgataaagtcgccgttggcgctgatcggcaccacgctgaaaaacaatcccacggcaaagaggatcagcgccagaccgccgaggatcttcaccaacggtaccagccagggccgcgggcggtgattcgtgaccaatcgtttgaccgtccgatggcgcgcatagtgaaccagcagcgacagaccgaggatcgagagcgcggtgcccagcgccatgctcatcaccgcggcgatgccccagctaacaatccccaacgcattggcgaataataaaatcatgatcgccccgctacagggccgaacgccgatagccagcaccacgccaaggcgcgtcttccagtcagcgccctgcatatcctgccccacgccgtgatggccgcagccgcacgaggcgtcatgctgatgcgctggcgtcagacggcgaatcacctgttttgtcggccacaggctttgcagagcgcgaaagataacataagccccaaagacgccgatggtcagggcgctgatcttctcgacgtaccagcggctggcgctaagatcgccggcggccagattcagccccaccgcaagaataaagacaaagagtatcgcagtgacgccctgcaacaggctgccgagaaagggcaccacccgcgccgccgtcaggctctcctgattggtgctcaggtaggtcgtcacgataaatttaccgtgtcccggtccgacggcgtgcagcacgccatagagaaaggcccccaccagcagccagataccgccgctgtactgatggttattcagcaacagaaggtacatcaccagatagcgatgcagggtaatttgggtggcgagacaccactggagaaagtcaccccagtggctgtgcaaggtgatagcggcggccagcagtagaaggccgccgcacccggccgccagcaggcgccagtcgcggagcgcaatcggagtcgtcatcgttataccattgtagtaaacgtaaaccgcctgacagcaactttacgacaggcgagcgaaggtgtcagcgctgaagggtgaggaatttgtcgaagctgttcacgggattgttcgtagtcaccaggctccgcattatctaccgatcgctatcttcccgacaccgtattagcgcagaatgcctcaagatcttgagcataccacagctatatctttttatgcgttattggttaccaataccttttaacaggaataattactcaaaaaatcacagataaaaataaataacttatttcttggcgagcattttttgtcagttattatgctgcgcttccggcaagaatattctttaactgctatttattgtactcttcagcaggatcacttccatgaaaagaggcttacttaccctggttactgctgccatcgctttccgtacaggccacctggcgcagcgacaagcgccaggaggcacgtgacgaaaagtggtgaaccggcaggcttcggcgtatcctggatgtgagtccttcccgcgccgaagcgagtattccaacccgccgccagaccgtgtcgcaatacttacctgtcctctactacctcccattgatatcttcctgtatacgttgaccgtgacgagttttcatctcattcaaccgcatgtaccagattaagcttacccgttgaaatacggcgtaatgtgctctattacagacaatgctattatcaccaggctttttgcagtatggtttaatcactgttgtagttttgcagtgaatgctatccagacgacttaaggttgtattttgtctgagaaatttctcatgccattcccgaaggttgtcggcgagggaggctggtttactggggtgacattgcccagtagacaggcaatcaatcatgacggcattgatagccgccttgccgtggccggaagcccaagccttcatcatcatgcgggtatcatcaagaggatcagggatgtacaggacgtggaaacccccaggaaagattcatcagttcagccagctcaccctttctttatccttcagatcgcggcctcttatcgttagcaatggagctagcccatgataccgctcgcgctcgtagcaaattaaaacgttatcaccacgctgtttcaaaataaaaaggcagtcaaatttaacaatgacctgacgcaggctcggaaaaccaaaaatatgcctgcaataaaagggaaaaccatgacgaataacgccgacataaaaaaaaggaacttcctgactcagaatgaaattgagtctttacttaaagcggccgataccggtccttatgctgcacgtaattattgcctgacgttactgtgcttcatccatggtctgcgcgccagcgagatctgtcgtctacgaatatcggatatcgaccttgctgcccgatgtgtttacatccatcggctaaaaaaagggttttcgactacccacccgttgctggataaagagatctacgccctaaagcgctggctggccattcgcagcagctggccgcaggccgccagcgaatggctgtttctctcccgcaaaggtaatcccctttcgcgccaacagttttatcagattatcgcgtcctcagggggactggcggggctgccactggagatccacccgcacatgctgcggcactcctgtggctttgcgttggcgaatatgggaatcgatacccgcttgatacaggattatctcgggcatcgcaatatccgccacaccgtctggtataccgccagcaatgcgggacgcttctatggcatctgggacaatccccgtgacaaacagcgatcgtcgctgatccaatagccttgacgccacggatggcgttgtatcgcgatcggtcgacaaattaaaatattcatgattattaaccctgcgttaattaggattactgttcccacaagttcttatttaatccttattactgagagttaatataaccctgcgtttactcaggaattagactgggtatttattggtgggaaaaatttccgcggctgtgtttttaataacggctggtagtgaaaaatatcctttcattttatatacctggcggcaacccgcacagatactattgagccgatgattaaaatctttaaaattaagaattatcacccgacgatatttttagtgtctggcaatgtaatatgttatcaattcgtgattaatcatcttcaccctgtaccgttttagcattacagaacctatttcgtcatggcgtatggtttcgctgtgacggtcattcatacctattttcaggagcaactattgtgaaccgacgtcgttttctaaccgccaaagaagttcaggccatgatgcaggctgctcgtcagggccctaccggcgaacgggactactgcctcattctgctggcctttcgccatggcatgcgcattagcgaactgctggatctgcattatcacgatctggatctccatgaagggcgggttaatgtgcggcgattaaagaatggtttttcgacgattcatccactgcgttttgatgagcgcgaggcgattgagcgctggagcctggtccgtgccggctggaaagcggcggacaaaacggacgcactgtttatctcccgccgcggcaccgcgctctcccgccagcaggcgtatcgtattattcgctccgccggggaaaatgcgggtaccgtcacgcacactcacccccatatgctgcgtcacgcctgcggctatgaactggcggaaagagggacagatacgcgtttgatacaggattatctaggacatcgcaatattcgtcacacagtacgttacaccgccagtaatgcggcacgtttcgctggcatctgggaaagaaataatcttttagaggaaaaagatcagaagacgaaaaatgaaataactgattgattttaaagaattaaaaaaataacgaacaggtcaattggggccaaactgtttatatcataaaaatgttttgacatattttgcaactcaccgcgccatatttccgcaaaaaaaatcatatctcattgattattatctatttttaaacctgcaattactcaattttctctaaccatatctctgctgcaccggcgatccgtcgccaacgccatcgctattcctttcgcacccccttccaccacaccagattatattaccataaaaactaaatttggcagcatttaaaaccacagaataccaggtttacacaaaatacagatcatttatcccaacgagtcaaaatggccccaattgtctcatcggttgggcgaaaactgtgcagagccggcagccggaccactcggctgaaatctgaaatgcctggaaggcacaacggctgccaatccggttcgttatttcgacatcgttcaaaggaaaacagtatgaaaatcaaaacactggcaatgattgttgtgtcagccctgtcactgagctccacggcagctctggccgataccaccacggtcaacggcgggaccgtgcattttaaaggagaagtcgttaatgcggcctgtgcggtggatgccggctctatcgatcaaaccgttcagttaggccaggtgcgttccgcgaaactggccacggcggggagcaccagttcggccgtcggtttcaacatccagctggatgattgcgacactacggtagccaccaaagcgtccgtcgccttcgccggtacggccatcgacagcagcaataccaccgttctggccctgcaaaactctgccgccggcagcgcaaccaacgtcggcgtgcagatcctcgacaataccggtacgccactggcactggacggcgccaccttcagtgctgcgaccacgctgaatgacggccccaacatcatcccgttccaggcacgttactacgcgaccggcgcagcgacggctggtatagcgaacgcggatgccacgttcaaagtgcagtacgagtaagacccgagtcaggcagggaagctattcgggccaggagggcccgctctctattttcaaccggagtgaaacgatgcagggaatgaaatctggtctgctgctgctactgcctccgctggcgctggccggtaatcattggaacgtcacgctgccggggggcagcatgcgttttcagggcctgataatggcgagctcctgccgcgtcgaagccggcgatcggcagatgacggtcaatctggggcagatcagcagtaatcgatttcatgccgtcggcgaagacagcaacccaatccctttcgcgattcatttacaggattgcagtacggcggtcagccagcatgtgggtgtgacctttcacggcgtggctgatggaaaaaaccccgacgtgctgtcggtgggtgaaggtccggggatcgccagtgggatcggtattgcgctattcgacagccagggccagcagctctcgctcaatcgtccaacggatcgctggatatcactctaccgcggaccgacgacgctaaatttcgtcgccaaatatcgggcgaccggacgccaggtcaccggcggtgcagccaatgcccaggcctggttctcattgacctatcagtaattaatccgcagacaaacaggacaacacggtgagcagacaaggagataatgtgagaaaaacggcaacgatggcgcatggcttactggcaggatgtgtgcttttcgccgccagtatctttagcgccagcgcgcaggcgggcgttgcgcttggcgcgacccgggttatctacccggcgggacagaagcaggtccagctctcggtgaccaataatgatgacaacagtacctggcttattcagtcatgggtggaaaatgccgatggtcagcgagacggccggtttgtcatcactcctccgctgtttgccatgcagggtaaaaaagagaacaccctgcgcattatcgacgccaccaataaccagctgccgcaggatcgggaaagtctgttctggatgaacgtgaaggcgatcccttcgatggataaatcaaagctcagcgacaataccctgcagctggcgattatcagccgcatcaagctctactaccgtccgggaaaactggccctgcctccggatcaagcggcggaaaagctgacctttagccgtagcggatcgtcgctgacgctgacgaaccccaccccctattacctgacggtgaccgaactgaacgccgggacacgcattctggagaacgccctcgtaccgccgatgggcaaaaccagcgtcaagctacccgcggatgccgggaacaccatcacctatcgcacgattaatgattacggcgcgctgacgccgaaaatgaatggcgtgctgcgctaacccagaagcgccccgccgcgcgggacacgctgcgcatgaccagaagcaatgacagccgggcaacgtcggaccggagggataatgtcacatcggaaatatggactggatcatttaggttgccgaactgcccggcgcctggtatctccggcgctggcgctgtggctctgctcacagccgtttgccgcgcgggcggacctctattttaacccccgctttttagctgacgatccggcggcggtggctgacctgtcgggatttgaaaaaggccaggaggttccgccaggcacctatcgcgtcgatatttatctcaacaatggttttatgaccacccgggacgtcactttccaggccgatgcccagggtcacggtctgtcaccctgcctgacgcgcggccagctggcgagcatgggtgtggataccggtcgggtgccgggcatggcgacgctggacagcacggcctgcgtgccgctgaccacgcttatcagcgaagctaccacgcgcttcgacgtcggacagcagcgcctgtacctcaccgtcccccaggcatttatgggtaaccatgcgcgcggctatattccgccggagctgtgggataacggtatcaccgccgggctgattaactataacttcacgggcaataacgcccataacaccacaggtggcagcagccgttacgcctatctgaatctacagagcggcctgaacattggcgcctggcgtctgcgcgataacagcacctggagctacagcagcggcggtagcacctcatccaacgagaatcgctggcagcacgttaacagctggcttgagcgggacatcacgcctctgcgttcgcgactcaccctaggggacagctacaccaacggcgatgtcttcgacgggatcaacttccgcggcgcccagctggcctccgacgacaatatgctaccggacagccagaaaggctttgcgccggtgatccacgggatcgcccgcggcacggcgcaggtgtcaatcaggcaaaacggctacgaaatctaccagagcacagtgccgccgggaccatttaccatcgacgatctctacgccgcgggcaatggcggcgatctgcaggtcacgatcaaagaagcggatggctcccgccaggtcttcagcgtgccctggtcaacggtgccggttctccagcgtgaaggccatacccgcttcgccctcaccgccggggagtaccgcagcggcaacagtcagcaggaaacgcccgattttttccagggcacggccatgcatggcctgccggcaggctggacgctctacggcggcacccagctggcagaccgctatcgcgcctttaaccttggggtggggaaaaacatgggctatttcggcgccctgtcgctggatatcactcaggccaacgccaccctggctgacgacagcgaacatcaggggcagtcggtgcgttttctctataacaaatccctggatgagaccggcaccaacctgcagctggtgggctaccgctactctacccgcggctattataactttgccgataccacttaccgccggatgagcggctacagtgtggaaacccaggacggcgttatccaggtaaaaccgaaatttaccgactactacaatctggcttacagcaagcgcggcaaggtgcagctgagcgtgactcagcagttggggcgcaccgccaccctctatctcagcggtagccaccagacctattggggcaccgacgatgccgatgagcagctgcaggccggcctcaacgccgccgtggacgatatcaactggtcgctaagctacagcctgacaaaaaacgcctggcagcaggggcgcgatcaaatgctggcgatcaatatcaatatccccttcagccactggctgcgttccgacagccgctcggtctggcggcacgccagcgccagctacagcctgtcgcacgatctcaatggccgcatgaccaatctggcgggcctgtacggcaccctgctggaagacaacaacctcagctatagcgtgcagaccggctatgccggcggcggcaacggcgacaacgggagcacaggctacaccgccctcaactaccgcggcggctacggcaacgccaacgtcggctacagccgcagcgatggctttaaacagctctactacggggtcagcggcggcgtgctggcgcacgccaacggcatcaccctgagccaaccgttaaacgataccgtggtgctggtgaaagcccccggcgccggcggcgtgaaagtggaaaaccagaccggggtacgcaccgactggcgcgggtatgccgtcctgccttatgccactgagtatcgcgaaaaccggatcgcgctggataccaacaccctggcggacaatgtcgaccttgacgatgcggtggtcagcgtggtgcccacccatggggcgattgtccgcgccaactttaacgcccaggtggggatgaagatcctgatgacgctgacccatcgcggcaaaccggtgccgtttggcgccctcgccaccggcgacagcaaccagagcggcagcatcgtcgcggacaacggccaggtctacctgagcgggatggcgctggcgggcaaagtgcgggtgaaatggggcgatggcccggacgctcagtgcgtggccgattaccgtctgccgccggagagccagcagcaggcgctcagtcagctttcggtcgcgtgccgctaaggagatcatgatgagaacactgcagtatctgctgggcgccctgttcaccctgggcgcaccggctgcgcttgccgccgatagcacgatcgccatcagcggctatgtccgcgataacgcctgcgcggtagccggcgaatcgaaggattttactgtcgatttacaggataacgccgcgaagcagttttatgccgttggggcgacgacgccgccggtgccgttccgcatcgtgctgtcgccctgcggcacttccgtcaccgcggtgaaggtcggtttcaccggcgtggcggacagcgtcaacaccagcctgttaaaactcgatgccggggcctcggcggcggcaggaatgggggtggaaattctcgatcagcagcagtcccggctgccggtcaatgcgccgtcatccaccatgacctggaccacgctgaccccgggccagaccaatattctcaacttttacgcccggctgatggccactcaggtgcccgtcaccgccgggcatgtcaatgcgacagcgatattcaccctggaatttcagtaagcggaggctgaaatgaaatggactcatgtgggctggctgctggccggcctgttaaccgcgagcgcttccctgcgggcggccgacgtcactctcaccgtcaacggcaaggtggtggccagaccctgcacggtttccaccgtcaatgccaccgtcgagctgggcgatctctatacctttagcctgatcggtgcgggctcggcatcggcctggcacagcgtggcgctggatctgagcaactgccccgtgggtacttcacgggtgaaagccaccttcagcggaacggcggacagcaccggctattacaaaaaccagggaacggcgggcaatattcagctcgaactgcagaacgaggacggcaccacgctgaacaatggcagcagccagtcggtacaggtggatgaggccagccagtccgctcgcttcccgctgcaggtcagggcgctgtccgtcaacggcggcgccacgcaaggcaccattcaggcggtgattaacgtcacctatacctacgcctgagccaggagagcatcatgatgaaaaaaataatccccctgttcaccaccctgctgctgggctggtcgatgaacgcctggtcctttgcctgcaaaacggccaccggggcgacgattcccatcggcggcgggtcagccaacgtctacgttaacctgaccccggcggtgaacgtcgggcaaaacctggtggtcgacctctccacgcagattttttgccataacgactatccggaaacgatcaccgactacgtgaccctgcagcgcggatccgcctatggcggtgtgctgtcgagtttttcaggcaccgtgaaatataacggcacctcttacccgttcccgaccaccacggaaaccgcgcgggtgatttatgattcacggaccgataaaccctggccggccgtcctgtatctgacgccggtgagcactgccggtggggtggccatcaccgcaggatcgttaatcgcggtgctgatcctgcatcagaccaacaactacaatagcgactccttccagttcatctggaacatctacgccaataacgacgtggtggtccccaccggcggctgcgacgtctccgcccgcgatgtcaccgtcaccctccccgactatccgggctcgatggccgtgccgctcaccgtccactgcgcgcaaagccagcagctggggtattacctctccggcaccaccgcggacagcgccaacgcgatcttcaccaataccgcctccgcctcgccggcgcaggggataggcgttcagctgacgcgcaacggcagcgccgtcccggcgaacagcacggtctcgctgggcaccgtcggcacctcgccggtcaatctcggcctgacggccacctatgcccggaccacaggccaggttaccgccggcaacgtgcagtcgattatcggcatcacctttgtctatcaatgatgaccgattatatcctctcgccctgctcgctggccgcccgcgggttgagccagctgatgctgaacgccgcgaagcggcccgttgagctgccggtcgagggcgtgtccctgcgcgagctggccgccgtgaagcggatcgtggtgtatctccctgacgatcccctgtggatgctcaccacgctgcgccaggcggcaaggctactcgacgaggccttgccgccgttaccgatgttgattctgagccgcagcccggccatctggctgtggcaaacgctgctctatcaggtgagtcatccggatcgtctgcgcaacgtccatactgcccccgccgatctgtcctgcgcggagctggcccatcggctggagaatgcgccgcggcttgagcggcttgccagcgaagccgccctgatccacggaaaacgggtcgtcgggttgacccacgccgagctcaaggtgatcctcgccctgctgcaagggcagacgataggcgagcaggcccaacgtctcggattgagccagaaaacgctctacacccagcggctggctggggtgaaaaagctggtggaatgtcatccgcatctggccccccgctttccgcgcacgctgctgccgcgctcacccgcaaacgcactgacggcgtttgaacaggaatgggtacaagcgatccacgatcgccaggtcttcccggtttttcaacctatcgtcgatagtcgctcacagctacagggggtggagatcctgatccgctggcgccaccgcggccaggtacttcacccccagacctttctgccgcacttccgcgccgactacacctggctgctgcttacggcctttgttctgcaggaggccgtgcagaatattaatgagtatccaggcaccttctatttttcggtcaacataccctcctcactcgccgacagtgacagcctgctgcggatggtggaagccgctcgccagcagcttcggcagccagagggcgtggcaaggctggtgctggaatatgctgaaactatcgattttcgccatcagagccgctccgccgcccacgtggcgcagttgcaacgtgctggcgtgcgcgtgatgctggacgactgcttttctcaggggagcgttatctttccggcgcgtcgactgcacttcaatgcgtataaactggatatgagcatcgtcaacgacgcccagcacgatccaaaggcgcttgcgctaataaaaagcctggcctactactgccagttaagcgacagtcgctgtgtggcggaaggggtggattcactggcgaaatttacgcagttaaaatcgctggggattgatcgcttccagggctatctgttttcaccaccgatgcggcgtgaacatctcccggatctgatccgccgcttttcccaccagcgcgatccggcggatcgttgagggtgcgagaaaagcgcaccggttagcaccggtgccggtacgtcatgcgcgaatatcgtcgtattcgcgggtgttatcgaattcatgtttggcaaacgggcagagagggataatcttccgctgctcctggcgcattttttccactaccttcgccaccagctgtttccccacgccctggcctttcaggctgggatcaacatcggtatgttcgataatgctgaggtgttcgccggtgggaacaaaaacaatctccgccacctggtttccctgcgcgtcgttaacataaaatttgttatgcccttccagtatttccatcttctcctcgcttatttatgacgatattgcagagcgccgctcgggcaggtatcaatcacgtttaccaccgtcgcgacatccacttcatccgggataatccacggcttacgcttcaggttgaagagcttcgcgctgccgcgcacgcagttcccggaatgctgacagatcgccgtattaaagtagacgtcgattttctccccggtgtaggcccggtagccggcttccagtaattccttatccatgacattgcctcggtcgtttttatctttcaggctaagcatagccctcgccgtggcggctgactatgcgcaagcgcgggaattgacgcctcacatcatgctctcccatcgcgcaaggatcccgcagtcaacgatcggttgactttcattcccgcaacgaggcgattacactcatgacacactggtatgatcactcagggatgttccattgaatcatattgccaccatcgcccgcccggcgcggttactgctcgtcttgccgctttccggctgctcactttcgccagagatcccggtattgggcgctgcttttcccggctggtttttctgcttactgggcggtgcgtttttactgatcccctgccatatcctgattacccgtaaaggctggcagccgcgcttttctcccctggtcttcagctacgtcgcgctgatgttcctgttcgccacgttgctgtggtttctgttttttgttcactgatcgcttatgacaacttcccgcacttctctgttacgcaaaaagtggcctctgctggcgctggtccttgccgccatcctggcgctgatcctcgttatctggcagttgcaaacctcgccggagaccaatgacgcctatgtctatgccgataccatcgatgtagtgcccgaggtcagcggacgcatcgtggagatgcccattcgcgataaccagcgggtgaaaaaaggcgatctgttgttccgcatcgacccccgcccctatcaggcaatgctcgatgacgcgaaagcccggctgacgaccctcgacgcgcagatcatgctgacccagcgcaccatcaaagcgcaggagtataacgcccagtcggtggcggccgccgtcgagcgcgccagagcgctggttaagcagaccacctccacgcgtatccgccttgagccgctggtgccgcaggggttcgcttcccaggaagatctcgatcaggcgcgcaccgctgagaaagcggcgcgggcggagctggaggccacgctgctgcaggccaaacaggcctcggcggccgtgaccggcgtggatgccatggtggcgcaacgcgccggggtcctggcgcaaatcgccctcgctgaactgcatctggaatttaccgaagtgcgcgcgccgttcaacggcgtggtggtggcgctgaaaaccaccgtcggccagtacgcctcggcgctgaagccggtcttcaccctgctggatgacgaccgctggtatgtgatcgcgaacttccgcgaaaccgacctgaacaacgtgcgccccggcgtggcggcgcggatcaccgtgatgaccaaccacaaccggacctttaacggggtggtggattcggtcggctccggggtcctgcccgaaggtgggagcgtcatcgaagggctgccgctgatccagaaaagcattaactgggtccacgtctcgcagcgcttcccggtgaaaatcgccgtcagcgatcccgacccggaactgttccgcatgggcgcctcggccagcgccgtgctgcagccgtagccgggcgacgctatgtttcctctcgcccattttttacgccaggaactgcgcgacgcgccgggacgcgccagctacacgctgcgcctgacgctaagctgcgcggtgctcatcaccctgtttatgaccctgcagatccctttcctggccgttgcgctgatcgtcgtgttctacgtcagccagcctaacgtgttgatgattaagctggtcagcgtggtcttttttgtcaccgtcaccgtggcgctcggcggcgtgctgctgatcatcaagtggacctatgactacccgctgatccgcctggcggcctccgtggcgctctttttctgcgccctctatctgatgcgggtgctgggcaagctgggactggcctttttcgtggtggcgctggcggtgatttacgctcagaccttcccgtcgatgaccagccagagcgagatcctggtgcggctgctgctttggctgtgggtggcgattaacaccgcgatcctcgtcaccctgctggtcaacgcctgctttcagcaggcctttcccggtaaccagtttaaggcgcgcctggccgggatgctgcacgaggtcgcccggcggctggcggccccggacgctgaagcgccaccgaccttcggcgagaccgccgcgcagttcaatcagctgcagtcgctgttcgcccaggccagccgggcgacaccggagatcgccgccgatcccctggcctggcgctcgcggctggccgccactttgcgctgctaccagctggcggccctgctgcaagcagacgaggcggatagtgacgatcgccagcagctgtcgcaggcggtacttcagctgaagaacgcccttagcgaggagccgtttgacggcgctattcctcccctgacgctcagcggtcgcggcgtcaatcgcgctgttctgcaggagatggctaccactctgcagcggctggcgcagggtgagccggttgccctgccgcagggtgaggtggagaaggcgcccctgctggcgccggacgcctggcgcaacccggcatatctccattttgcgctcaagaccctgctggcgaccctaatctgctatgtcttctataccgctgccgactggcagggtctacataccattatgctgagctgcgtgatcgtcgcccagcccgggctgggcgccacgatgcaaaagacatggctgcgcatcggcggggcgctgctcgcctccctgctggcgctgctgttaatcgtctttgtccagccctggaccgattcgctgacgggcctgctggcgatgtccctgccggtgctggcgctggcggcgtggattgccgccggctcggagcgtatcgcctacgccgggatccagattggtttcacctttgcgctggcctttctcagctggtttgctccgctgacgaacctcaccgagctgcgggatcgggtgctgggcatcctgctcggggtgctggtctcctccattgttcatttgtatctctggccggacagcgaagcgccgcagctgaaaacccgccttgcggcactttatcgccggctggcggactgcctcgccgccccgaaggaggcggttccgctggctcccctgcttgtcgccttcaccgacagcgaagcgctgatccaccgggttcgcgccgaaccgctgggcacgtatgctcacccctggccccaggcgaaaggctggccgatgcgcgccaccctcgcccaggccgaggagatcgcccgcctcagcgaaggctaccgactcaacgccgcgccgggagacccgaccctggcccgctgcgccgaacagctgcggcgctacgctgaacgcatcgaacaggaggcgacggcgcctggcgaacagctgaccgccgacctgactaacccctttggcccggcgctggccgccgcgctggccgccctgcccgactgggggccgacaccgatagcgactgagcaacaggctaaaacgtcatgatgatccttcctttctccgcgcgcctgcgcggcactctttttaccctgacgctgacgctgctcagcggctgcgcgctgatccaggatgagcctgcccaggtcgccatcgtcaatccgcagcaggcccagctggcgcaggtgatccacctggcgaacagcgactggccggccgcccgctggtgggaggcctatgatgatcctcagctcaatatgctgatcaaccgggcgctgcagaactcgccgaccatgcaggccgcccggctgcgcatctcccagtcgcagtccacggtggaactcgcccggtcggcaatgggcctgcaggccaccgccgtcgcggcgcaaaaccgcctgcggatcaccgacaaatcctttagctggccctactcatactccctgccggtggataaaaacggcccctggtatacgctgaataccgttggcgtcggggcgcagctgaatatcgatctctggggggccgatcgcgcccgggtcgccgccgctattggcgagaaaaacgcccggctggcggagaccgccggcattgagctcgacatcgccagcagcgtggcgcagctctatttcgccatgcaggcgacgttccagaaaatcgcgctgctgcaggagctggagggcattgcccgattctcggtggaagcccacgagcaccggacccggcgcggcctggaagacagtgtggatgtggccaacgcccaggccgaacagctcgccgctcgccagcagatcattagcgccgaggggatgctgacccagtatcgtgaaaccctgcgggcgctgatcggcgccgatgcgcagagcatgccggccatccatccggtggcgctgccggcgctccaggagacgctgccgccgtcgctttctttcgagctgctggcccgccgtccggacctgcaggcgctgcgcggctacgtcaccgcctccctgagccaggtcgatgcggcgaaagcggccttctatccccattttgatatcaaagcgttctggggctataacgccctgagcgtcggggatctgtttaagtcctctttccagcagatcaacctgctgcccgggctgtatctgccgatcttcgacggcggccgtctgaacgctaatctgcagtcggtacgcaccgccagcaacatcctgatcaaacagtacaaccaggcggtgctggatgcggttcgcgatgtcgctatcagctccagccagcttaacgacctgaatcagcagcgcgcgctgcagcagctaaaagtcaccgcggcgcagaccaccaccgatagcgctcgcgcccattatcagcgcggcctcctcagccgctacgccgccgaagaagcccgccgggcggtcctcgcccagcagctgttgctgctggacattgaggcccagcggctaagcaccgacattaccctgatcaaagccctgggcggcggctatcgagggcagtaacaagaatgccttcccaataggggaaggcaatcagactgcagacaaagtgcaatcttcagcgattgcacggcggcgctgcgcttgcgcgggcctacagctaactgcataactgtctgatattgcagttttttgtaggccgggtaaggcgaaagccgccacccggcagaaaggcgagcacaatagcgaaacgggtttgtcattcgccagaatgccttcccaataggggaaggcattaagctgaaggggcggggtagatgcgcggcgattacaccagggcgcgcagctcttcccgcatataggtggaaaagaattccggatgcttaatcaccagccgttcgccggcggcgacccgttcagcccactccgccactttgtcggtaaacccagcgctccagccctgctgttggccgcgcgcagcgacgtcggccggggtggcgggtacgcccagttcttttaaatatttgagaattcccttcgcggtactttcatccatagactgtggtactggctcagacgtattcataccaccgatgaaatccaatgctttatcaatgactgctggcataggtgtgtccttatattaaccacatagtaaacctgactacactatggaccggaaagcgacgtgatttcaaagaacacgctcacgttatgggacatcgcgcattgagaaaaggggattttgttctgctggggcggggattggacaaaaaacaagccggccccaccgggccggcctgaggcttgcgtcaggcgttgctgagggatttttgcgcggcgctggaccgactgttctccagcatccggcggaccgggacaatcagcacggccagcacggcggcgcagatcagcaatgcgatggagcagcgggcgaagaggtccggcagcagcgacagttgatcggccttcacatgaccgccgatcaggcccgccgccaggttacccagcgcgctggcgcaaaaccacagccccatcatctggccgcgcattctctccggcgccagcagagtcatggtagccagcccaatcgggctgaggcacagttcaccgagcgtcagcatcaggatgctgcccaccagccacagcggcgacacaccggccccgccgttgctcagaacgttctgcgccgccagcatcatcaggccaaagccgccgctgcgcacaggatgccaatcacgaatttggtcatactgcccggacgaacgtttttacgcgccagcgcaggccacgcccagctgaataccggcgcgaggagaatgataaacaaggcgttaatcgactggaaccagaccgcggggatctcaaaatcgccgatcatccggttggtatagtcgttagcaaacaggttgaaggaggtcggtttctgttcaaaagcggaccagaaaaaggccgccgagaccagcaaaataaagcataccagcaggcgcgcccgctctttacggttgagtccggcgaagacgaacagccagatgaaatagagcgccacggaggcggcaatcacatagaccagcacgctggccaccgctaccgggttaatcacgatcgtgcccaggctgataagcgtgaccagcaccgccactcccagcgccagcgccagcagccacgctccaacgccattctttttcgccaccgggctgttccaggtggaatcgaggccaacctccgcgtcatagcgcttcatcgacggtacggcaaagacacggaaaatgatcagcgccaccagcatcccgatccctccgatgccgaagccccagtgccagccatgcgatttgataagccagccagagatcaatggcgcgataaacgagccgatgttgatccccatgtagaacagcgaaaaaccaccgtcgcggcgcgcgtcgccctttttatacagggtgccgaccatcaccgagatacaggttttaaacaacccggaacccaggacgataaacatcagaccgataaagaacagatcgttgcccagccatgctgacagagcgatcgacaggtgccccagggcgatcaggatagagccgtaccagacggcgcgttgttggccaagccagttatccgccagccagccgccaggcagcgcggccagatacatactgccggcaaaaatcccaacgatcgccgaggcgttctctcgcgccaggcccatgccgccgtcgtacactgtcgccgccataaacaggatcagtaaaggacggatgccgtaaaacgagaagcgctcccacatttcagtgaagaacagggagcccagcggataaggatggccgaaaaaggtacggctttcgtttttattaacagaggaatgcataaattctccaggtaaggtgcgccgcagcgcaagttaaccgtataaagcaggctgacgatttataatttgtttgcattaacatcaaacacgagcatttttaaccatttgataaccacgcaatggttttgtccagccccttaccttccctttttagatgaaaagtcgacaaacatctagttttacagatttaatgttcgcaataatgcaaacgacgttgactttatatcattacgcacaaaacgaaattttacccattaaaaacaaacagttaataatttatcgagagacataaaccaccggcgcagaggcggtgtataacggcaggaaaagtaagggaaacagactggatagtggagaaatagcgctaagcgagaatattgtcagcaatccaggcgctacatacctggagagcctaccatacagcagggttaacacggcatgccggctgctacagccggcgccattctgcgcgctatttcacacgctgccctgcggcatcaatgactggctcaccgtcctccttcacgaatgcgcctttttgcggcgccgtcaggatctccagcaccacctctgacgggcggcagagtcgggtgccctgcggcgtcgttacgatcggacggttaatcaggatcggatgctgaagcataaagtcgattatctggtcgtcagtaaaccggtcttccgccaggcccagcgcgtcgtagggttcgacgtttttccgcagcagcgcgcgcaccgggatccccatcgcggcgagcagctggcgcagctcatcacccgacggcggcgtctccagataatagataacggtgggctcggcgccgctgttacggatcagcgccagcgtattacgcgaggtgccgcagtcagggttatggtaaatggtgatgctcatagtacgttctcatggctggttgaaggagagacgcagcgccagcgcggccagcgtcacaagcagcaccggcagggtcatggtgatgccgcagcggaaataatacccccaaccgatggtgatgtgcttctgcgccagcacatgcagccacagcagcgtggccaggctaccaattggcgtgatcttgggccccagatcgcagccgatgacgttggcataaatcatggcctctttgatcgtccctgttgccgcgctgccatcaatcgacagggcgccgaccagtacgctgggcatattattcattattgaagagaggaaggccgacaggataccggtgcccagcgtcgcggcccagagcccgcgctccgccagcatgttcagcaccgtggtcagataatccgttaacccggcgtttcgcagaccatacaccaccagatacattcccagcgagaagatcactatctgccacggggcgccgcgcagcaccttgccggtgttaattacccgcccgcgcttcgcgacaacaaacaggatcccggcaccgagcgccgcgatggcgctgaccgggatccccagcggttcaaggacgaaaaagccagccagcaacagcagcagcacgccccagccggtgcggaacgtcgctggatcttttatcgccgtggccggcgcttttagtaacgccatatcccaggccggcgggatatccttgcgaaagaacaggtgcagcatcgccagggtggtgaggatcgccgcgagatcgaccggcaccatcaccgaagcgtactccctgaagccgatggcaaagaaatctgccgaaacgatattcaccagattcgacaccaccagcggcaggctggcggtatcggcaataaatccggcggccatgacaaaggccagcatcgttctcttgctgaaccccagcgctcgcagcatggcaatcacgattggcgtgaggatcagcgccgccccatcgttggcaaacagcgccgccaccgccgcgccgagcaggataatccaggtaaacagcagacgaccccggcctcttccccagcgggaaacgtgcagcgcggcccattcgaaaaagccagactcatcaagcagcaggctgataatgataacggcgataaaggtggcggtcgcattccagacgatatgccataccaccgggatatcggctacctgtacgccaccggtggccagcgccagcgccgcgccaaatgccgcgctccagccgatccctaacccccgcggctgccagatcaccagcaccagggtcaggataaaaatcgtacctgccagcaacatcgttcctccgcaaatcacattcgaaaaatcatatatgttaagataaattttttaccggcaacccggcccgccagccagtctgctgatcatcagccgcacatcctcctgctgactgagccaggcctgctcaatcacctgcgccgcccaggccggcatctgcggagagaggcggtaatggacccacttaccctgtttacgatccagcagcaatccgctctcacggagcatcgccagatggcgggagatcttgggctgggactgggcgagcgccgtacagagatcgcacacgcacagctctccacgcgccttgagcagcaatacgatccccagccgagtttcatcggcgaggtttttgaacagttgcaggggcaataaagacatgatttctcctcaagcgtgacggacagcatacggggccacaaagaaagatcaatatacatgcgcaaaaacatatatattaattcacgtctgcgatgagcatccgggatgttgcgccccgccatccctgctaaatagcacggaaaaatgccgcgttttcttttatccatcatcgaaatatgtcaggctggagatcccattggattgccagggctttcaggatgagtacgatttatgtggttgttttaacgtatataaaaccgctcgaagcggttgaccgtgcgatccccgcccacatcgaatggctcaaaaaaggctatgccgacggcctctttctcgcctccggccgccgtattccccgcaccggcggcgtcattctggcaaaatgcgatagccgggaaactctgcaagcgcgtctgagccaggatcccttccagcagctgggtctcgcccgtacagagattattccctttgaggccagcatggcgtcacccgcgctgcagtcgctgttataaccctgtctgaaagcatatcccggaggaaaaatgcagccgtactttcactggatcaatgaacctgccgagtggcgccgcgattccgacggcctgacggtggtcactaataagcataccgacttctggcgccatacctggtatggcttcgagcgcttctctggccatctctatgccgcagaagtggcgggcgattttaccctgcaggcaaaaatctgtgcggatttcaccacgctttacgaccaggctgggctgatgatgatggccgacgagcagacctggctgaaggcgggaattgagtttaatgacgatgccccggccatcggcagcgtactgacgctaacccactccgactgggccaccgggcttttccccggcgacccgcgcaccttctggctgcggctgacccgcaagggcgacgcgttaagactgcagtattcaaccgacggcgagcgctggccgctgctgcggctcggctactttccgccaggcccggtgaaagcgggcgtcatgtgctgctcaccggagcgtggcggactggcggttgcgtttcaggatattcagctttccccgccgctggacaaagcgctgcacgatctgagctgaacgctagcgggaagacccgattttctctgcatcatccgcggcatacattatcaggaaatcaatcagggctttcacccttttcgttctgcctgcgttttttgggtaatagagataaaccggcggataggttttccagtagtcctccatcacgggaataaactgctcacgatcgggctgtaattgcaggattggttcaaataaacggccaatccccagtccgtggcgaataccgtcggccatgacgtcaatatcattgctgattaactgtccgggcatctcgacggtgagctgctcgccgtggtcattgaggatcagcggcaggatgcggttgttggtaataaagcgatagccaatcagccggtgatgatggagatcggcaggcatcgcgggcacgccatattcggcaagataggcagaggaggcgtatagcccttcacgaaacggcttcattaacgggcgggcgaccacgccgccttcgagaatatcgccaaagcggatcccaaggtcgaaacgttcttcaataatattgacggtaccgtcatagaccgatatttccagctggatccccggatattgctgacaaaatgccgccatcgccggtttgagaataagcaggtaggcaaagcgcgagagggttattctcactgccccggagggctcctgattctggtcgcggatgatttccagcgacttttccagtgtctccaccgccgcggcggtctgctccagcagctgttgcccggtttccgtcagctcgatacgccgggtagtgcgcacaaaaagggggtggccaatatgctcctccagcagcctgagcgcattgctgaccgacggcggcgtgatttcgagcttgcgcgcggcggccgagatattgccctcgcgcgcaatgctctgaaagatgcgtatctgattataaagcgcgttattcatagcatctccttaagacaccctcgcctgattattaagtacaggctaaatattcttaagtcaatgaccgcctaatcttccccccctgcggctcgtatacttttgtctcttcccgctgacaacgactttccggagacaactatgcgaattttatgtctggatatccctgcccccggcgcgacgctggaacactatgcgccgcaccttaccgcagaagccctgcacgcctggggactgtacaagtcaggctttattcgcgacatctatttccgtcaggatcgacccggcgtcgctattttcctcgagtgcgacaccgtggaagaggcgaataatgtcatggccgaatttccgctggcaaaagcgggtctattaaccttcgagtgtattccactcggctcgtttattagctgggaaaatctcttctctgctgaatttaaacatcaggagtaacgttgggaatggctcatattcttgtcgtttccgggcatccggatcttaaccattccatcgccaacgccaccatcctcgatgagctggcgaccgccctgcctgatgcggaaatccgtcgtctggactggctctatccggacggcaaattcaacatcgccgctgagcaggaaagcctgctgcaggcggatgtgattgtctggcagtttccctttagctggtatgggctgcccgggttaatgaaacagtggctggacgaggtatttgtccacggcttcgcccatggctcaacggcgaaactgggtggtaaaaagctgatcctctccttcaccacgggagcgccacaggcgctctataccgctgacggtttctttggccatgccattgaggagtatctccttcccttcgagaccacggccaggctttgcaatcttgagctgctggcgccggtttatacctgcggtattagctacgccgaccgggatgccgacaaaatcgctcagcaaaaaacgcttgcccgggaacacgcggccagactgatcgcgcggcttaatactctggtggaataacccaaagggagaaaataacgatgcagtatacccggctcgggaagagtgacttactggtctcccgtatctgcatgggatgtatggggtttggcaatccgtcaacgggtcagcatcgctggacgctggacgaaacagccagccgggacatcatccgccacgctctggaacagggcatcaatttttacgataccgccatcgcctatcagaacggctccagcgaacggtacgttggccgggcgctgcgggagatggcaaaacgcgaggaggtggtgctggccaccaagtttctgccacgaaccgccgcgcagattgccgaggggatcagcggaaaacaggctataacccgctcgcttgaccagagtctgcgaaacctcgggatggactacatcgacctctacatctaccacatctgggattacaacaccccggttatcgacgtgctggaggcgctgcacaccgcagtgaccgccggcaaggtgcgcgcgattggcatttccaattgctatgcctggcagctggcgaaggcgaacgcccttgcccaacgcgaagggctgacatcctttgtttctgtgcagagccactacaacctgattatgcgtgaagatgaacgagagctgttcgggctgtgcgcggaagagggtatcgccatgactccctatagcgcgctggccagcggccgtctctcccgcttagaaggccacacgcggcgagcggtggaagatgattatgcccggggcaaatacgacggcacggcagagcaggaccggatcattattgcccgcgtcgccgaacttgccgaacggcatcaggtctccatgaccgaaatttcgctggcctggctgctgactaaagtcaccgccccggtgatcggcgccacgcaaaagcatcatgttgacggcgcggtcaacgctgtagcccttcaactgagcccggaagacatccgttatctggaagaagcctaccagccgcacgttctcacaggcgtgatggcgcaaaacacgccgcaagccaaagaccatcatcaggtgtggacgcggtaaccctctgtcctgttcagcagggagaataaaacatgaaaaacgtgattgccgcggcagccttgtcgcttgtgctgtctgattttacttatgcccacgaacaaagagatgaagctatgatgaaaattaccccttccacccttgcggacgctgatattcaagcggtctccccggcgctggcgcgcttcggccgcgaggccatcagcaacgacctctggcaacgtgacgccctgtccgcccgcgaccgtagcatcgtgaccgtagcgatgctgattgcccgcaaccagccaggcgagctgaagcactatattgccgttgcgctcgatagcggcgtgacgccagcggaagtgtcagagatcattactcacctcgccttctacgctggctggcccaatgcgatgtcagccgtcagcgtcgctaaaaccatctttgaagccaggggcgtgacggcagaggccctgcccgccgcctcgccaacgctgctgccactcaatgaacaggtagagaaacagcgtgcagacaccgtggaaaaaaatgtcggccccatttcgcctggcctggttaaatttaccgccgacccgctgtttctcgacctctggcaacggcccgcgcttacgccccgcgacagaagtctggtgacggtcagcgcgttaatcgccgccggacagagcgcgcagattggctaccacctaaacagagctatggataatgggctttcggctgaagaggccggagaagtggtcgcccaggcggcgttctacgcgggatggccaaatgcgtttaccgccgccccggtggtcggtgaggtattgcgagcgcgcgagagcaaagctgaataaaaaagaataaaggacagggaagctgtcctttatttatcgttaattgttaatttaaaggtaccacgagggctttcgattaggtctcgcggaaagaacataaacggtctatcgaagtatggagacttcgatcgtgagtctgttcacatcgctcattgagaaaattgccgttccgtatgccgtcatgagtctcatcctttgaaagcagcgatcgctgtggcgagacgatagcgcggacatgtctatttggtccagagatggacatctcaatttagctactacaccgctacttcgattgatgtattttatatcaaatatcaatgaattgaattattcatttaatataaattgatgttatagcaatcgctatacaggctccttagtcatgactgacctccccacaccgcatatcgcaagaatttgctctctcagccagcggtgaccggggtcgcgttccattcttgggtgccacatctgcgataccgtaatacgacggcttttgaacggcagctcgaaaaggtgtacctggtccgttacctgctgattgagtaaatagagtgcgggtatcatggcgataagatccgattccagcgccacggaaagtgctgtcggaaatcccggtacgacgcttgcaattttacgttttgtccccagttcggccagcgcatcgtcaacggatccgtgcaacgcgccctcgggtgacgctaccacatggccccaggcgacataatcactcacgcctatttcagcctgcttagccagcgggtgccctttacggacgacgccaacaaaccgatcctcaaacagtcgttgcagccgtatttctggccccatattactctgaacgccaatctccagatcaaccagcccttcccgaagatagcgcgacgttttttccggcttaggcgcgaagcgtatacagacgtccggcgctgcgtcggcaaccgctgctataagcgcaggcccaaacgccaccacaaaaccatcgtttgccctgatggtaaaaagacgcgccagattttgcgcgctgaacgtttcagttgagggctgtaataccgccctggcatcgtgcactgcacgcctggcgcgatcccgggtcgcttcggcccacggggtcagtaccatgttacgcccggcgcgtaccaggatcgggtctcctgtgacatcgcgtaacctgcttaatgtccggctcatggccgaagtgctgaggttcagacgacgagccgcacctgcgacactcgcttcactcagcaatacgtcgagagctaccagcaaattaaaatcgggatcagacattacccttcctcccagcacattaagataaggcgtttgatgcaacaataaagtgaaaatagtgcgccttccgcctggtaaaagccatctttatagttttgtcatccatacactcttctcagaggacaaatgatgacgctcttttccagtcaacccggcgacgaaggactgcctggcccggcgcgcgcacgggtgatggccgcaataatgaccaccaccttaatgggcgtgtttgatggcaccatgatcaacattgccctgccctccatggctcaggagatgcaggtacctgccagtattgccgtctggttcgccaacgggtatctgctggcggctgcgatgacgctggcgatattcgcggcgcttgcggcccgtctgggttatcgccccgtatttctggcgggcctgacgacctttaccctgacatcactgggttgtgcgctggcgaataagcccgaagtgcttatcggtatgcgcgtgcttcaggggatcggcggcgcggcgacgctgagtattgcccccgcaatactcaggtccgtatttcccggacgcttacttggccgcattctggggttccatgccctgctcattgcctcgagctccgctatcggcccggtattgggcggtactatccttcacacccttagctggcaatggctgtttgcgataaacgttcttcccggcaccctcgccttactgctggcggtcagagcgctgccgcgggatgcgatccgtatgcaggcgcccttcgacaccgtgggcgccatattgtcggcgctgctgttgggttcgacgatcatggcggcgaacagcctacagaacgctacttctcaattcggcagcctttgctggatggctctcgctgcgctgagcggcatggcttttatctggcaaatccgccgcacgggttctcccttactgccgccgagcatgtttaaaaatgaacgttttaccctcgcggccttcacgtcgatggttgctttcgtcagccaggggatcacctttattgcgctacccttcctgtttcagagcgaatacggctacagtccggtagtgtctgccctgctgtttacgccgtggccattagggatcgtgctgattgcgccgcatgcaggccgttgggcggacacgatatcagccccggcgatatccaccctggggctggtgatatttgtcgtcggtttgatcctgctggcgacgttacccgccagaccttcaatgtgggatatctgcctgcgaagtctggtatgcggaatagggtttggctgctttcagagtcccaataaccgggaaatgctctcaaacgttattcgtgagcacgcgagttatgcgtccggtgttttatccattatgcgcactttcgggcagtgcctgggagccgccgccgtagccgttctgctggcagcagatgaaaggtcaattcatgttgcgctgtggagcgccgccgcggcctctgcggtatcggtcgtcgtcagcgcgagccggttgcgaaaaatcactcatcctgcggaaacaggataagtgcgaaaatatcactaaacgctacgactccagcgccagcagcgcaaaacgccgatcccgcaaccaaagtggagtcctccgtcggagttcaatagactaacagaatgctataaccgctgatttattaagggaaaattgagtttggtagacttcaggagacttgaatttggagcgggcgaagggaatcgaaccctcgtatagagcttgggaagctctcgttctaccattgaactacgcccgcgaagaggtgcgagaagcattatagcccttacgcaccctgtgacaagcctgccggatgctgactggcgataaaataaccttttagcacttaggtttacttccctgcggcggcaggtaacgcagcggatcgatggctgtcgcccggtagcggatctggaaatgcagccgcactgagtcggcatccgtactgcccatggtggcaatttgctggccggccttcacgctctggccattattcaccattagcttatcgttgtgggcataggcggtgatgtaatcctcgctgtgcttaatcatgatcagattgccatagccgcgcagctgattgccgacgtagaccaccttgcccgccccggcggcatacaccggctggccgcgggttccggcgatatcaatgcctttattgccgccatcggcggtggaataaggcaggaccactttgccgctggtcggccagcgccagcagcgctgtcccaccggcggccaggaggactgaggtaccgcggacgaaggcgtgaccgccgcggtgcgcgtagaggaagattttttcttcgttgtcttcgttgaactgctgccgttaagcttcagcttctgccccacctcaatggtgtaaggcggggagatgttattcaggcgggccagatcgcgaacgctggtgccggtggtgcgggagatgccgtacagggtatcgccgcgtttaacggtgtaggtgccaccggaatcggaggtgctggagcagccggccagcaccaggcttgccgccagcatcagtgtcatataaaagcgtttcatcatcaggcatcctgcacttaacacaaccacttacctcgcaatcagggcgaatatcataccagtccgcggcgcagggcgtcatccctgatggcgaaaccattatcccccgtccctagcgcgcggtctgcggcaggcagaaattcatatttgcgccacgcggcgcggcggcctctcctcgctattgcgcgttgccgttcacagagctgcctccagggcttgttttggtaatgcctttctcccatttatgggctaccctagtggcctgagtacatgacccggcgggtttgtgccgggtcattttttattttcaggagtcgtcatggccggggaacacgtcattttgctggatgagcaggatcagcctgccggtatgctggagaagtatgccgcccatacgtttgatacccctttacatctcgcgttttcctgctggctgtttaaccagcagggtcagttgctggtcactcgccgttcgttgggcaaaaaagcctggcccggggtatggaccaactcggtctgcggacacccccagcagggcgagaccttcgagcaggccgtcacgcgccgctgtcgcttcgaactcggtgtggagatctctgatatcgcgccggttcacccggccttccgctaccgggcggtcgccccaaacggtatcgttgagaacgaagtgtgcccggtatatgccgcgcgcgtggtaagcgaagtgcagcctaacgacgatgaagtcatggactatcagtgggttgacctggcaaccatgttaagcgcgctggccgccacgccgtgggcgttcagcccgtggatggtgctggaagcggaaaatcgggacgcccgccaggcgctgaccgactttgttgcgcgtctgcgcgggtaagctgactattctccaggccaggcgcagccctgtgcctgtcattaatgcctggcggcgctacgcttgcacaggcctacggttctgcgccattgcgtagcccggataaggcgtttacgccgccatccgggatccccggcttgcgctgcgctgagccaggctacgccagccttaggacctcacatcagacataaaaaaacccggcaagccgggttttttgcttttcgcgaagggcgattatttctgcggacgcatcgccgggaacagaataacgtcgcggatggtgtggctgttggtgaacagcatgaccatgcgatcgataccgatacccagaccagcggtcggtggcaggccgtgttccagcgcggtgacatagtcttcgtcatagaacattgcttcgtcgtcgcctgcggctttcgcatcaacctgatcctggaagcgctgcgcctggtcttcggcgtcgttcagctcgctaaagccgttaccgatctcacggccgccaatgaagaattcaaagcggtcggtgatttccgggttgacgtcgttacggcgcgccagcggagaaacttccgccgggtattcggtgatgaaggtcggctggatcaggtgcgcttccgccacttcttcgaagatctcggtcacgatacggcccagaccccagctcttctccactttgatgccgatagattcagcgatcgctttcgcggaatcaaagttatccagatccgccatctcggtttccggacggtatttcttgatcgcttcgcgcatggtcagtttttcaaacggcttgccaaagtcgaacacctggtcgccgtaagtcacttcggtattgccgaggatgtcctgcgccagggtgcggaacagagattcggtcagctcgatcagatctttataatccgcataagccatgtagagttccatcatggtgaactctgggttatgacgaacggagatcccttcgttacggaagttacggttgatctcgaagacgcgttcgaagccgccaaccaccagacgcttgaggtacagttccggcgcgatacgcaggtacatgtccagatccagcgcgttatgatgggtgatgaacggacgcgcggaagcgccgcccgggatcacctgcatcatcggggtttctacttccataaagccgcggccaaccatgaactgacggatgcccgccaggatctgcgaacgcactttgaaggtcttgcgggattcatcgttggagatcaggtccaggtaacgctggcgataacgcgcttcctgatcctgcaggccgtggaatttgtccggcagcgggcgcagagctttagtcaacagacgcagctcggtgcagtggatagagagctcaccggttttggtcttgaacaacttaccgcgggcggcgatgatgtcgccgaggtcccactttttgaactggtcgttataaacgccttccgccaggtcatcacgcgccacgtacagctggatgcggccgcctacgtcctgcagggtcacgaaggaggctttacccatgatacgacgggtcatcatgcggccagcaacggccacttcaacgttcagcgcttccagctcttcgttttctttgccatcgaagtcagcgtgcagttggtcagaggtatggtcacgacggaaatcgttcgggaatgcgacgccctgctcacgcagcgcagccagcttctcgcgacgggttttcagttcattattaaggtcaattgccgcgtcagcgccctgtgcttgttgttcagacatgttggttcctcataaccctgctttcaaacttgcttcgataaattggtccaggctgccgtcgagcaccgcctgagtgttgcgggtttccaccccggtacgcagatctttaatacgcgagtcatccagcacgtaagagcggatctggctgccccagccgatatcggacttgttgtcttccatcgcctgcttctcggcatttttcttctgcatctccagttcataaagctttgctttcatctgcttcatggcctggtctttgttcttgtgctgcgaacggtcgttctggcactgcgtcaccaatccggtcgggatatgggtaatacgcaccgcggattccgtacggttaacgtgctgaccaccggcgccggaggcgcggtatacgtcaatgcgcaggtcggccgggttaatttcgatatcgatatcgtcttccacttccgggtaaacgaacgcggagctgaaggaggtatgacggcggccgccggaatcgaacgggctcttacgcaccagacgatgaacgccggtttccgtacgcagccagccgtaggcgtaatcgccaatgatcttaatggtcacggatttaatccccgcgacttcaccttcggattcttcgatgatttcggtcttaaagccgcgcgcttccgcccagcgcaggtacatgcgcatcagcatgctggcccagtcctgggcttcggtgccgccggaaccggcctgaatgtcaaggtagcaatcggcgctgtcgtattcgccggagaacatgcggcggaactcaagctgcgccagcttctcttccagggtatccagctcggcgacggcttcgttaaaggtctcttcgtcgtccgcttccacggccagatccagcaggccggcaacgtcttccagcccctgggacatctgatccagggtatctacgatggcttccagggaagaacgctctttacccagcgcctgggcgcgttcgggttcgttccacacgtccggctgttccagctcggcgtttacttcttcgagacgctctttcttggcatcgtagtcaaagataccccctaagaacgtcggagcgctccgtgaggtcctgaatgcggttttttaccggatttatttcaaacatggtcggtttcttttaatggatttgtcaaaatgcggtgataagagcggaattctaccggattcgcgcccttattcctacactgttgtcaatttggccagaggtgatcgatgatcagctgcaggctacggttgccgcggaactcgttgatgtcgagcttgtaggctaactggacttcacgcacgccgttatccggccagatggaagtatcaacgttgaaggcgataccgtccagcagcggcccgccgtcaaccggttcgaccatcaccttcaggtgacgctcgcccaccagccgctgctgcagcaggcgaaaacgaccgtcaaacagcggttccgggaacatctgcccccacggcccggcgtcgcgcagcatctgcgccacttccatgctcatctccgccgccgccagcgggccatcggaaaccacctcgccctgcaacagcgcaggatccagccattcggtcaccagctcgccgaagcgctgttgaaactcttcaaaacgcgcctcctccagcgataagcccgccgccatcgcgtggccgccgaacttcaggattagcccgggataaagcgtatcaaggcgctccagcgcatcgcgcatatgcaacccctgaatggaacgaccggagcctttcagcgtgccgtcgccggtaggcgcaaaagcgataaccgggcgatggaagcgctccttaatccgcgaggcgagaatgccgactaccccttgatgccattgcggatggtacatcgccagcccgccgggcagggtatcggcgctgcgctccagctgctgacagagcgttagcgcttccgcctgcatcccctgctcaatctctttgcgcgtctgattaagcgcatcgagctcgttggccagcacccgcgcttcgccgatgttgtcgcacagcagcagcgcgacgccgaccgacatgtcgtccagccgtcccgccgcgttcaggcgcggcccgagggcgaaaccgaggtcgctggccgccagcttttgcggatcgcggttggcaatttccagcagcgccttaataccgggccgacatttgccggcgcgaatgcggcttaacccctgccaggtgaggatacggttgttagcatccagcggcacgacgtccgcgacggtgccaagcgccaccagatccagcagctcggcaaggttcggcgcggggatgccgcgagcgtcgaaccagcctttatcgcgcagaaaagtgcgcagcgccagcatcagataaaacgccacccccaccccggccagtgattttgacgggaagtcgcaatcgcgcaggttgggattaacgatagcttccgccgccggcagcgtctcgcccggcagatggtgatcggtcaccagcaccgggatccccagcgcatgggcatgatcgacgccggcatgggacgagatcccgttgtcgacggtcatgatcatctgcgcgccgcgagcatgggcctgatcgaccacttccgggcttaaaccgtagccgtcttcaaagcggttcggcaccagataggagacgttgccgtaacccagcgcgcgcagggccaacacgctgagcgcggtgctggtggcgccgtcggcgtcaaaatcaccgaccaccacgatgtgcaaccctttctggaacgcgtcatgtagcatctcgaccgctttttcaacgccggtgagctgcgtccaggggagcatgcctttgacgctgcgctccagctcctgcgcgctgcgcaccccgcggctggcatatagtcgctgcagcagcggcggcaggtcggcgggtagttcgacgccgtcaaccgcctcgcggcggcgtagttgtatctgttgtttcacgcgaatcagttaccgcttgtctgttttttgtgctcatcaaggaacgccttcagctctttcggcccctgatagcccggcagcaccatgccgttactgaggaccatcgccggcgtaccgttgacgcccatctgcacgccgagggtgtaatgtttggcgatatctacgctgcagctcgccggctgcacgcctttaccattcatggcgtcatccagcgctttgttgcgatctttcgcgcaccagatggccttcatgtcctgctccgcctggctttgcagaccctggcgcgggaaagccagatagcgcacggtgatccccagcgcgttgtagtcgctcatctgctcgtgcagtttatgacagtagccgcaggtaatatcggtgaagacggtgatgacgtgctgctccttcggcgctttgtagacaatcatctcattgctcagcgcgttcagcttacccagcagcagctggttggtgacgttgaccggctgcgcgccgctcacgtcgtacatcggcccctggatgatatgtttgccgtcgtcggtcacgtacagcacgccgctgtcggtcagcaccgtgctcatcccggaaaccggcgatggttgaatatcggtgctctgcacacccagcttcgccagcgactgtttaattgccgcgctatcggcgtgcgccgctcctgaaagggaggccgccagcagggtgaacatcaataaaccttttttcatactcagtccttttgttcagcactcacgcccgcgggtggtgctgttgatgaagttgtcgcagacgctcggtcgccacgtgggtgtatatctgcgtggtggagagatcgctgtgtcctaacagcatctgcactacgcgcagatcggcgccatgattgagcaaatgcgtggcgaacgcatggcgtaacacgtgcggggaaagcttttcgctgtcgatccccgccagtacggcatagtgtttaatccggtgccagaaggtctggcgcgtcatctgctgggcgcgctggctgggaaataagacatccgacgccacgccgttcagcagccaggggcgaccatactcgaggtaattttccacccacagtaccgcctcttcccccagcggcactagccgctctttgttgccttttcccaccacccgcagcacgccctgccgtaggctgatgtcgctcatcgtcagccccaccagctccgagacgcgcaggccggtggcatacagcacctccagcatcgctttatcgcgcaattccagcggctgctccaccagcggcgcctgcagcaggcgctcaacctgcgcctcactgagatcttttggcagccgctgcggtagcttcggcgaggccagcagcgcgctgggatcgtccgggcgaattttttcccggtacagatgctggaaaaaacggcgcacggcgctcagcaggcgcgcggtgctggtggctttgtagccgccggactgccgctcagccagcagcgcctgcagatcgtcgctgccaacgcttgccagcgacaggccgcgatggtgcagccactcaactaacatcgtcaaatcgcgacggtaggcgctgagcgtattctccgccaggttgcgctccagccaaagggcatcgagaaactgttcgattagtgccagatcctgtttcacatcggcctctttgttcgttaaacgctctcattatgccttaagaggacgcctttctggtacactgcccgccattcacggcaagaatcgagatgtttacgcgatgaatataggtctgttttacggctccagtacctgctacaccgaaatggccgcggagaaaatccgcgatatcatcggccccgaactggtgacgctgcacaatctgaaagatgactcccccgcgctgatgagccagtacgacgtactgatccttggcatcccgacctgggatttcggcgaaattcaggaagactgggaagcggtctgggatcagctggacaccctgaacctcgagggaaagatcgtcgcgctgtacggcatgggcgatcagctgggctacggcgaatggttccttgacgcgctcggcatgctgcatgacaagctggcgaccaagggcgtgaagtttgtcggctactggccaaccgaaggctatgagttcaccagcccgaaaccggtgatcgccgatggccaactgttcgttggcctggcgctggatgaaaccaaccagtacgacctgagcgacgagcgcatccagagctggtgcgagcagatcctcggcgaaatggccgaacacttttcctgacgcggcttactcctgcgccggtttttgcagcaccagccggcgcagatcgcgccactctccggcgtccatgctgtccgccgccagccaaagatgctgtccgcgccgggtatcgacatggcgcaaacgcagcagcataccgctattgataacccacggcgtcccgaggatttcccattcggcgttttgccagcgaagacgggaatcggtgagcagttttatctccccgcgacgggcatggatccgccgctggctgcgcacgcagtcgaagaccaccagcgacagcagcagcagccagatcggggtatagctcagcggccagggaaccaacagcaccagggccgccaccacgccgtgaagcagcagggaaaaccactgcgcgcgccaggagatacggagatcagattgccacaggaccacgttcccgattccgtgtctgaattaaggttaccatccgctgcagctccgcatcggccggtttgccgtggttcatcagccagttgaacagatccggatcgtcattttccagcaggcgaatgaacagctgtttgtcagcgtcgctgagggtatcgtactcatactcaaagaacggcatgatggagatgtcgagttcgcgcatcccgcggcggcatgcccagtggatacgtgctttattgttaatgtccatgttgaccttccagcagcaaaatataggttagtttaacccgttttctgccgtaactttacaggaatatcgctgaatgcgagcatccttccataaaaaccttaaaataatgatgggtttattgattccctgcgtcaggcggctgtctcacgccagcgcacaaatggcctgttgaaagcacttgcaatgcactatagctcttttaccattggtcacacacactgcgttaagcgattcaggatatgactatggcttttacaccttttcctccgcgtcagccttcctcttccgctcgtctgccgttaacgctgatgaccctggatgactgggcgctggcgacaattagcgggccggacagcgaaaaatatctgcaggggcagattaccgccgatgtgagtcatctcaccgatgcccagcatctgcttgccgcccactgtgatgccaaaggcaagatgtggagcaacctgcgcgtattccgtcgcgagggcggcttcgcgtggattgagcgccgcagcctgcgcgacgcgcagctgaccgagctgaaaaaatatgccgtcttctccaaagtcaccattgccgccaacgacgatctggttctgctgggagtagccggcttccaggcgcgcgccgcgctggcgccgctgttcgccgccttgcccgacgctgccaccccggtggtcagcgaaggcgccaccagcctgctgtggtttgaacacccgggcgagcgcttcctgctggtgaccgatgtcgacaccgccaaccgcgtcaccgacgcgttgcgcggcgaagcgcagtttaacaacagccaacagtggctggcgctgaatattgaagccggcctgccggttatcgacagcgccaacagcgggcagttcattccgcaggccaccaacctgcaggcgctgggcggcatcagcttcaaaaaaggctgctacaccggccaggaaatggtcgcgagggcgaaattccgcggcgccaataagcgcgcgctgtggacgctgtcagggaccgccagccgggtgccggaagccggggaagacctggagctgaagatgggcgacaactggcgccgcaccggtacggtgctggcagccgtacagctggatgacggaagcctgatggtccaggtagtgatgaataacgacatggaaccggacagcgtgttccgcgtgcgcgacgatgccggcagcctgagcatcaaaccattgccgtattctctggaagaagattaaggaaaagttcccggcttgcggcgcttgcgccttagccgggctacccggccgcagaatatcgtagccacggtaagcgcagcgccaccgtgggatgtttatcaggactggccgatgtaaagataaatcgccaggaagtgacacacgctgccgccgagcacgaagccgtgccagatagcgtggttataaggaatacgtttgcagacgtagaagatgacccccagcgagtacaccaccccgccaaccgccagcagcgttaccccgcccaccgccagcttcactgccagctgatagaccacgataagcgacagccaccccatggtcagataggtcaccagcgacaaaattttaaagcggtgcgcgatggtcagcttaaacaggatccccagcagcgccaggctccagatgacgatcatcagccccttcgccagcggtgaattcaaccccaccagcaaaaacggcgtgtaggtcccggcaatcagcaaatagatggcgcagtggtcgaatttcttcagccactgtttcgcccgctgatgcgggattgcgtgatagagcgtggaagcgaggaacagcataatcatgctgccgccgtacaggctgtagctggcgatcgccgtcgcgctggcgtttgtatccgccgcctgcaccagcagcaacacaaggccgacgataccgaacaccagcccgatcccgtggctgatgctgttggcaacttcctctgccagagaatatccctgagtgattaatggtttgcgaaccatactggactccgtgaaaacaagaacgctttcattgcccacttagggtaactgagaatgattccagtgaacacctgttagctaaaataaaacgatgtatatttgtaaatacattaaaatcaaaaagttacatttttatttcaactcacagctgttcctgattatcttaaagcgttttgaattcaatgacataaaactggctctcgccaggatagatgtcgctgatgacctgccgcagctgcccgagagtcatattctcctgttgcgcatgctgttcggtcagcgtatcgagcgtcaccgtcgaggtcgcggtcacggcaatggtgcaaaaatagccgtcatcttcatagcgcccaacgcgcagcacatcgccgggcttaaagtgcgactccgctgcatcgcgaatggtgatggttttgcgcccggcgaggatgtcgtcctgaaaacgctgaaaaaaggtaatgtcattggcctgcatgatataattccgtcctggtcattatgaattgtgagttcgccctgtgagtatgttctcccacgccgctgtcgccagtctcaataattttgagatgatggtctaccactacgtcattaaaaatcgtgacaaagtgatgtacatgaccatccgggaactggccgaggccgccggggtctccacgaccaccgtgttacgcttctgccgcaaactgcagtgcgagggctactctgaatttcgcgtgcgctttaaattatatctcgagcagaatgagcctcaacaggcaaatatcggcgccagcgaaataatgagcttttttaaaagcgtcaataatgacgagttcgatgaattactcgagcaggccgtcgatattattctcgcctccgaacgtattatttttgtcggcgccggcacctccggcgcgctggcgaaatatggcgcacgcttcttctccaacgtcggtaaattcagcaaccatattgacgacccctattttcctgtaaccaacgatatggcccgcaacgcgctggcgatcgtgctttccgtctctggcgagacggaagagatcctgcgctttgccagccagttcagcctgcatcattgcaaggtgatgtcgattaccagccatgagcattcgcggctggccaaactggctgatttcaatctctcctggcacgtgccgcagacgcgcattggcggcgtctacgatattacaacgcaaattccagtgatctatattctcgaatccctcggacgtaaattagcgcgcaaaatcagctaaaaataacagcctgtttttttgatgtaacatattacctttggcggaatttgttatatcgtgacattcactttcactttgctagactcgagaacaatagttattagagagattagccaggatgaaaaaattaacccttccgaaagattttttatggggcggcgcggtcgccgcgcatcaggttgaaggcggctgggatcagggcggcaaaggccccagcatctgcgatgtgttgaccggcggggcgcacggcgtgccgcgcgaaatcacccaccaggtcgaagcgggaaaatactacccgaaccacgaagccgtcgacttctacggtcgatacaaagaagacatcaaactgttcgccgagatgggcttcaagtgcttccgcacctctatcgcctggacccgcatcttcccgcagggtgacgaaacccagccgaatgaagagggactgaagttctacgacgacatgttcgacgagctgctgaaatacaacatcgagccggtgatcactctctcccacttcgagatgcccctgcacctggtgcagcagtatggcggctggaccaaccgcaaagtggtcgatttctttgtgcgctttgccgaagtggtcttcgagcgctataagcacaaagtgaaatactggatgacctttaacgagatcaacaaccagcgcaactggcgcgcgccgctgttcggctactgctgctccggggtggtctataccgagcatgacaatccggaagagaccatgtaccaggtgctgcaccaccagttcgtggccagcgcgctggcggtgaaagcggcgcggcgcatcaacccggacatgcaggtcggctgcatgctggcgatggtcgccctctacccttactcctgcaaaccggaagatgtcatgttcgcccaggagtcgatgcgcgagcgctacgtctttaccgacgtccagctgcgcggttactacccgagctatgtgttgaatgaatgggaacgccgcggcttcaacatcaggatggaagacggcgacgcgcagatcctgcgcgaaggtacctgcgcctatctcggcttcagctactacatgaccaacgcggtgaaagccgagggcggcactggcgacgccatttccggtttcgaaggcagcgtgccgaacccgcacgtcaaagcttccgactggggctggcagattgacccggtcggcctgcgctattctctgtgtgaactgtatgagcgttatcagaagccgctgtttatcgtggaaaacggctttggcgcctacgacaaagtagaagccgacggcagcatcaacgatgactaccgcatcgactacctgcgcgcccacatcgaagagatgatcaaagcggtcacttatgacggcgtcgatctgctgggctataccccatggggctgcatcgactgcgtctccttcaccaccgggcagtacagcaaacgctacggcttcatctacgtcaacaaacacgacgatggcaccggcgacatgtcccgctcgcgcaagaagagctttaactggtacaaagaggtcatcgccagcaacggtgagaacctgtaactaaccgccctctcccggccgggggagggctaattgcttatccgccagacacttctttacagctttaccattgccaaaacccgttcgcccgttaagataagcctcgtgaatatttgaggcaatcatgattaagcgacaacgcaaagccattctttttgtcctcctggcctgtctggtggtgctaacctgcaccgctcaacggatggccgggatgcacgcgctggtcatgaacctcaccgccgacagcccgtcgctacagcaaaaccaggatcaggccgaggcgccggtcacgccgtgcgagctcagcgccaagtcgctgatggccgttccgccgatgctgtttgaaggggcgctgttggctatcaccctgctgctggcggtgctggcggcgatcccgccgcgtatcgaacgccagtggcctccccgcgttatctccccaccccgattgcgggtgcatctgcgattatgcgtcttccgtgagtgattgattctcctgacagttcaggttaattcatcacttacggagcaaacttatgtatatggtattcaggcgactactggtctgcctgctttggctatggctgcccgtcagccaggccgccgacagcggctggctgcgcgccgccgacaatcaacacgccagcgtccgcctgcgggcgcaaaccgagagcaatggcgacactcgcctgcttttagacgtagcgctggaaaagggctggaaaacctactggcgctcgccaggggaaggcggcatcgcgccggctatcgcctggcacacgccgctggaggtgcgctggcgctggccgacgccgcagcgcttcgacgtcgcgggcatttccactcagggctatcacggcgacgtcagctttccgatgacgctgcgcgggaagataccgccgacgcttagcggcgtcctgacgctctctacctgcagcaatgtctgcattctcactgactatcccttttcgctggatatgacgactccggcgggggagcgatttaattatgattttacccgcgcgatgggcacactgccgctgcgcgatggcctgacttcgcagctgaccgccagctacatcagcggaaaactgacggtgaccgcccgccgcgatgccggctggcagcagccagcgctgtttatcgacagcatggaggatgtcgatttcggcaaaccgagctttaccacccgcggcgctacgttgaccgccaccgtaccggtcaccgacagctggggcgaagcggcgccggatctgcgcggcaaaacgctgtcgctggtgctggccgatagcggtcaggcgcaggaaagccaaatcgccgtcgccgccggcagcgccgcgccggggctggcgttaggctgggtgctgctgatggcgctggccggcgggcttattctcaacgtcatgccctgcgtgctgccggtgctggccatgaagctcggctcgctggtgcaaaccgaaggtcgcgaacgcggcgcggtgcggcggcagttcctcgcctcggtgtgcgggatcgtcgtctcgttcctggcgctggcgctgatgatgaccgcgctacgcctggggaatcaggcgctcggctggggcatccagttccagaacccgtggtttatcggcgcgatggcgctggtgatggtgctgttcagcgccagtttattggggctgttcgaaatccgcctctcctccagcgccagcactttcctcgccaccaggggcggcaacggcttaatgggccatttctggcagggcgccttcgccaccctgctggcgacgccctgtaccgcgccgttcctcggtaccgccgtgtcggtggcgctggtggcgcccctgccgctgctgtggggcattttcttcgccatggggatcggcatgagcctgccgtggctgcttatcgtcgcgtggccgggtctggcgcaacgactgccacgcccgggccgctggatgaatcatctgcgggtggtgctggggctaatgatgcttagttcagcgctatggctggtcagcctgctgacgatccacatcggccgtacgccggtgcttaccctgctggtgattctggccatcgccctgctagtggccaccgcctggcgctaccgctggcggacggcgctgcgcgcgggcgccctggccatagtggtggcgggcgccgtcgcctttgtcgcccaacaggacggccagggcccgcgccgcgaccgggttaactggcagccgctcagcgagcaggctatcgccagcgccctggcggagcataaacgggtatttattgatgtcaccgccgactggtgcgtgacctgtaaagccaataaatacaacgtgctgctgcgcgacgacgtccagcaggcgctgttagcgccagacgtagtcgccctgcgcggcgactggagccgcccctccgctgacattagccagtttttaaccgcacgcggcagcgccgcggtgccgtttaaccagatttacggaccggaattgccgcagggacagattctgcctgcgctgttagaccgcgaacaccttctcgccaccctgtccgccgctaaaggaaaataacatgagaactatcaccgcattattactgctgtgcgtatcggccttcagcttcgccgccccggcggaagaaccacaatcgaacggtaatgaccagttagcccagctgctgtttaacgatccaaatagcccgcgcaccggcgcgaaagagccaaaactcacgatcgtctcgtttaccgattacaactgcccttactgcaaacagtttgatccgctgctggaaaaaatcgtccacgataatccggacatccagctcatcgttaagctgctgccgtttaaagggcagagttcggtgaatgccgctaaaaccgcgctctccacctggcgtcagcagcccgataaattctgggcgctgcatcagcggctgatggcgaaaaaaggctatcacgatgacgccagtatcgccgccgcgcagaagaaaaccgctaccgatagcgtaaatatcgatgacaagaccatggattcgctgaagatgaacctgattttgtcgcaggtgctgaatattcagggcaccccggcgaccatcatcggcgatcagatggtggccggcgcgatccctgctgatgagctggaggggctggtgaaagagcagctggcgaaagcccgtggccagtaaaatcaggcgctggctgcgcgagctggcggtgtggctgctgattggcgcggcggtgagtctggcggtggattattttcgccagcccgcgctgccgcaaaacgtcagcgccacatcgctgcagacactcgacggcaggacgctggatctgcatgccatgagccagcaaaagccgctgctgctgtacgtctgggcgacctggtgcggagtttgtcgctataccacgccgtcggtggcatcgcttgccgccgacggcggcaatgtgctgacggtagccctgcgttccggcgataacgtcaagctggagaggtggctgaccaggaagaaaatgacgctgccgacggtgaatgatccgagcggccagctggcgcggcagtgggatatccaggtaacgccaacgctggtggtcatttctcaaggcgaggtaaagtcggttaccaccggctggaccagcggctggggaatgcgcctgcggctgtggctggcctcctggtagaccgtcgggctttagcggtttttatgccgggtaaggcgtatccgccacccggcctaccattcggctttgaccccgtaggcccggcaagcgcagtggactgcaccccaaaagttggacacccaactgagtaaggtgcaattttatggctaaaccaaagtattcccctgaaacaaaactggctgtggttaatcattatttgtccggtaaagacggagaacagagtacagccgacctttttggtattgaaagaacatctgtccgtcgctgggtcagggcatggcagttccacggtgcagaaggcctgactgcaaaaaataatcattattccgatgaatttaaactcgtggtcgtccgggcggttatcagtgaccgcctgacgatgcgtgaagcggctgcccggtttaatctctccgcagaaatacttgtccggcgctggctcgacgtgtacaacgatgccggagcggaaggtcttttaaacatacaatgcggacggcccggaaaaatgacaaagccaaaaaatatcccaccactgacagataaagagctggaaaaactctcccccgaagagctcagggccgaactgcgttatctgcgggcagagaatgcctatctaaaaaagttgaaagccttggttcagagcgaaaaaaatggcaaaaagccctgataatcagtgaactaaggcacgaacacgctctgcgggaccttctgcgggcggccggtatgtcccgtagcacgtggtattacaatatgaatgcactgaagcaaggggacaggtatgcgggtcttaaagagaacatcaggaagatataccactatcacaaaggtcgttatggctaccgcaggatcacgctcgtactgagaaaacaggggctgcggataaaccataaaacagtgcagcggctgatggcagaactgtcactccggtctgtgataagggcgaaaaaatatcgtgcctggaaagggagaacgggcgaggccgcgcccaatatcctgagccggaacttcggtgcgtcaaaagccaacgaaaaatgggtaacagatgtgacagagttcccggtacagggaaaaaagctttacctgtcgtcagttctcgatctgtttaaccgggaggttatcgcctacagcctgtcggaaaggccggtgatggagatggtgaatacgatgctggacggtgcgttcccgaagctcagaccgggagatgctccgctgctgcactcggatcagggctggcattacaggatgaggagctatcaggaacgtttaaaggcgcatgggatgacgcagagtatgtcgcgtaaaggaaactgcctggataatgcagtgatggaaaacttcttcgggaccctgaaatcggagtgtttttatctgagggagttcaggagtgtcagtgcgctaagaaaagccgtagaggactatatccattactacaacaacgagcggataagcctgaaattaaaaggcctgagtccggtagagtaccgaacccaggctctgagagccgcttaatatgaaccatccaactttatggggtcagtccagcagcgccgccgggcaatagacatctacgggttatttcccgcccgccagttcaaggaagctacccgtcacatacgacgctttgtcgctcagcagccaggcaatggcctgagcgacctcttccggctggccgccgcgcttcatcggtagcgaacctttcactcgatccacgcgccccggttcaccgccggaggcgtgcatctcggtataaatcagccccggacgcacgccgttgacccggatcccctgcgccgccacctccagcgccagcccggtagtcagggtatctaccgcccctttcgacgcggcatagtcaacgtactcccccggcgcgccaaggcgcgacgccgccgacgacacgttaactatcgccccgcccttgccgccatgccgatgtgacatgcgctttaccgcctcgcgacagcagaggaagtaaccggtgacgttggtggccagcacgcggttaatacgctcggcgctcaggctctccaccgtacactgggtaaataggatcccggcgttgttgaccagcgccgtcagcggctcgcccatgcggtcaactgcctcaaacatcgccatcacctgcgcttcatcgctgatgtccgcccgcagcgccgtggctttgccgccagacgccacaatggtatttaccacctcggtggcggcgttaatgttgtgatggtaattgaccgcgacggtatacccttcctgcgccagcagcagcgccgtcgcccggcctatgccgcggctcgcgccgctaataagagctattcccataccttccctccaaaaaaataaaggcgccgcagcgcctttaaaagtttagctaaaacgcaaacttactggtattcgctcatcggtacgcaggagcagaacaggttgcggtcgccgtagacatcatccagacgcttcaccgtcggccagtacttgttgtgcaaccctgccgggaataccgccagctcgcggctgtacggatggttccactcgcccaccagctcgccctgggtgtgcggcgcgttcaccagagggttatcctccagcggccattcgccggctttgacgcggtcgatttccgcgcggatcgccagcatcgcgtcgataaagcggtccagctcgaccttgctttccgattccgtcggctcaaccatcagcgtccccgctaccgggaaagacatggtcggggcatggaagccaaagtcgatcaggcgcttggcgatatccagctcgctaatgccggtctcttctttcagcggacgaatatcgagaatgcattcgtgcgctacgcgaccatcgcgaccggtgtagagcaccgggtaggcgtctttcagccgggtagcgatgtagttggcgttaaggatcgcgttctggctcgcctgcttcagcccttccgcacccatcatgcggatatacatccagctgatcggtagaatggacgcgctgccgaacggcgcggcggaaaccgcgccctggcgggtcagcataccttcaatctgtaccacgctgtggcccggcacgaacggcgccaggtgcgctttcacgccgattgagcccatgcccgggccgccgccgccgtgcggaatgcagaacgttttatgcaggttgaggtgcgaaacgtcggcgccgataaagcccggagaggtgatcccgacctgggcgttcatgttggcgccgtcgagataaacctggccgccaaactggtgcacgatctcgcacacttcgcgaatggtctcttcatacacgccgtgggtcgacggataggtgaccatgatgcaggagagattggcccccgcctgctctgctttttcacgcagatcggcgagatcgatgttgccgtttttatcacaggcaacgaccactacctgcatacccgccatctgcgcggaagccgggttggtgccgtgcgcggagctagggatcaggcagatatcgcgatggccttcgttgcggctctcgtgataatggcgaatcgccagcaggccagcatattcaccctgcgcgccggagttcggctgcatgcagacggcgtcatagccggtcagtttcaccagccagtctgaaagctgggcgatcatctgctgataaccttccgcctgctcgaccgggcagaacgggtgcagctcagcgaattccggccaggtgatcgggatcatctccgccgcggcgttcagtttcatggtgcaggagcccagcgggatcatcgcctggttcagcgccagatctttacgctccagggcgtgcatgtagcgcatcatctcggtttcgctatggtagcggttaaacaccggatgggtgaggatcgcatcgtcgcgcagcatcgccgccgggatcgaacggctatccagcgccacgtctttatccagggtatcgatatccagaccgtgatcgtcgccgacgatagcgcggaacaggttcagcacatcttcgcgggtggtcgcttcatcgagcgtaatgcccaccgcgccgtgaatatcgctgcgcaggttaatctgcagggcttcggcacgcgccagcaccgcggctttatccgccacttcgacgcacagggtgtcgaagtagtgggcatggcgcagcttcagccctttcttctgcaggccatcggccagaatgtcggtcagacgatgaatgcggccagcgatacgtttcagacccgccgggccgtggaataccgcgtacaggctggcgatgttggccagcagaacctgcgaggtacaaatgttggagttcgctttctcacggcggatgtgctgctcgcgagtctgcatcgccatgcgcagcgcggtattccccgccgcatctttcgatacgccgataatccggcccggcatggagcgtttgaattcatctttcgccgcgaagaaggctgcgtgcgggccgccgtagcccatcggcacgccgaagcgttgggcggaaccgaaaacgatatccgcgccctgcttgcccggcgccgtcagcagcaccagcgccataaagtcggcagcgacgctgacaatcactttgcgcgctttcagctcggcgatcagtttgctgtaatcgtggatttcgccggtggtgcccacctgctgcagcagcacgccgaagacatcctggtgatcgagcactttgtcggcgtcatcgacgatgacgtcgaagccgaaggtttccgcgcgggtgcgcaccacgtccagggtttgcggatggacgtcggcggcaacgaagaagcggttggcgctcttcagtttactgacgcgtttggccatcgccatcgcttcggcggcggcggtggcttcatcaagcagcgaagcggaagcgatatccaacccggtcagatccagagtgacctgctggaagttgagcagcgactccagacggccctgggatacttccggctggtaaggggtataggcggtataccagcccgggttttccagcatgttgcgctgaatgaccggcggcagctgcacggcggtatagcccatgccgatgtaagacttgaagcgcttgttgcgactggcaatcgccttcagctccgccagcgcggcgaattcggtagtcgcgtcgcccacctgcggtggggtcgccagctggatatcctgcggcacaatctggccgatcagggcgttaagcgaatccgcgccgacggtcttcagcatctcttgctgctgctgagcgtccgggccaatgtgacgttcaataaaggcgtcgcggttttcaagctgacttaaagtctgagtcatgagcgatggttcctgaaacgtgcggtgaatcgtggttgtctgactggtttgcccggcaagcgctgatgcttaccgggccagaatacgcaaaatcattcgcgttgcaggaaggcggcgacacagcgactccccgggagcttacaaaagtaagtgaccggggggagccaggaagccaacgcccctgcagcgtgaaggatgaagcgtatttattcgtcttccagtaaagcttcatacgcggcggcatccagcagcgcggcaacctgcgcttcgtcgctggctttgatcttgaagatccagccgtcggtatacgggtcgctgttgaccagttccggagagtcgttcagctcttcgttgacggcaacgatttcaccgctaatcggcgcgtagatatcggaggccgccttcacggattcggcaaccgcgcaatcggcacccgcttcaacggtggcgcccacttccggcaggtcaacgaaaaccatatcgccaagcagctcctgcgcgtgctcggtgatccctacggtataggtaccttccgcttctttacgcagccactcgtgttctttgctgtatttcagttctgctggtacgttgctcatcaattcatctccaaaaaagggaaatcacacaatggctttgccattgcgtacaaaaccaggtttagtcacttttaccggcatttcacggttacggatttgcaccaccgcggtgtcgccaatcccggccggcacgcgagccagcgcgatgctgtagcccagcgtcggcgagaaggtgccgctggtgataatgccttctttttgattaccgtcgctatcggtaaaacggaccggcagaccaccgcgcaggacgcctttctcggtcatcaccaggccaaccagctgctcggtgcctttttcgcgctgcatctccagcgcttcgcggccgatgaagttacgatcggcgggctcccaggcgatagtccagcccatgttcgccgccagcggggaaacaccttcgtccatctcctggccgtacaggttcatcccggcctccaggcgcagggtgtcgcgcgcgccaagaccgcacggcttaacgccagcgtccagcagaccgcgccagaaatcagccgcctgctcgttcggcatcacaatttcataacccgcttcgccggtatagccggtggtggcgataaacaggtcgccggcctgcacgccgaagaacggcttcatgccttccacggcctgacgttgagcgtcggtaaacagcgtcgccgccttcgctttcgcctgggggccctggaccgcgatcagcgacagatcgtcgcgaacggtaatttcaaggccgtaaggttcagcttgttcggagatccaggcgaggtctttttcgcgggtggcggagttaacaacgaggcggaaataatcttcagaaaggaaatagacaatcaggtcgtcgatgacgccggcggaggcggtcagcattccggtgtagagcgctttgcccggggtggtgagcttcgccacatcgttggccagcaaatagcgcaagaactcgcggatccggctgccgtggaaatcgacgatggtcatatgcgacacatcgaacatccctgcatcgccgcgcaccgcatggtgctcatcaatctgggacccgtaatgcagcggcatcatccagccatggaaatccaccatgcgcgcgccgcacagcgtgtgttgttcatacaacggagtctgttgagccatcttttcctcatcgaataaaacggaaccagccacgaaattgtcggcgattttgcgccacgaaattcggcatcggcatcgctgacggacgccgacgcaaacgttctctttggcctgaacttaccaccgaacccggcgctaaaccataagctcattcagggcatcacattagcttatggctaaaatccgccgaaaagcctacagagttattgactggaaaaaagcgatttacgccacataaaattaacattaacggcgcgacaattaggtaatgatggtgttttatgcgattttacggctctaatttctttaacaaaaaaaaggacgcattaataaatctaatgcgaaaaaagaggtgaaattagaatatttcaaatgagggggaaaacccggcgcccaggccgggtgaaagaagtgtgacgcggttaacgtaaccaggcaggcagatcgttgaggcccatcgcctggcgaatcagctgcggtttcacgcccggcagcgtatcggccagtttgagtcccacatcgcgaagaaatttcttcgccggatggctcccggagaacatttcgcggaagccctgcatgcccgccagcatcagcgccgcgctgtgcttgcggctgcgctcgtagcggcgcagataaagatgctggccgatatctttgccctgagcgtgcaggcgcttcagctcgtcaataagctcggcggcatccataaaaccgaggttgaccccctgcccggccagcggatggatggtatgcgcggcatcgccgaccagcgccagtcggtgggcggcaaactgacgggcatagcggccggtcagcgggaaaacttcacgttcacttgccagctggcagaggccaaggcgattatcgaacgcgatattcagcgcctggttgaaggtggtttcatcagcctgctgcatccgctgcgcttcccccggcgatagcgaccagacgatcgagcacaggtgcggatcgctgagcggcaggaaggcgaggatcccgtcgccatggaacgcctggcgggccaccgcctgatgcggctcagcggtacggatggtcgccaccagcgcatgatgatggtaatcccagaaggtcagcggaatatcggctttattgcgcagccatgaattggcaccatcggcgccgatcaccagccgcgcggtcagcatgctgccgtcctgcaggctgagaaaggcttcattctcgccccacgccacctgctgaagttccgccggagccagcagggtaacgtcagcgcaacgctgcgccttctgccacaatgcatgatgcactacggcattttcgataatatagccaaggtggctaaagcccatgctctggtcatcgaagctaatgtggccaaagctgtctttatcccacacttccataccgtgatagcagctggcccgctgggcgacgatctcgcgccagacgtccagcttcgtcagcagcttttcgctggcggcattaattgccgaaacgcgcagcgccggcggcgcatcggcggccagcggtcgcggctctgctttctccagcactgcgacgcgcaggccgctaccctgtagaccgcaggctaccgccagccccaccattccaccgccaacaatggcaacatcaacactttgcacgttctactccttaacggggaacccaaccgagggtacgctgcgccagcgcatcgcgcgccggggtaaataattccatcgccatcagaccgacgttgcgccccgccaccagcggcgcccaacggttggcaaacagatgcaccagcccatcggtcacgccgatggtggcggctttatcccctgccctgcgcgcctgatagcggcacagcagtggataatgaccgacatcttcgccgctgagatgggcgtcagcgagtaattccgccaggctcatcacatcgcgcaggccgagattaaagccctgcccggcgatcgggtgcagcgtctgcgccgcgttgccgaccagcgccaggcggtgcgacaccgcgcggctggcggtggtgagggccagcggataaacgctgcgcttcccggcgtgggtaatacgccccagccgccagccgaacgcctgctgcagctcctgacaaaagcgttcgtcagaccagctctgcacctcatcgcggcgcgactgcggatgacaccacaccagcgagcagcgcccttgcgacatcggcagcatcgccagcgggccatgctcggtaaagcgctcgaaggcgcgaccttcgtggggcaacgcggtgctgacgttagcaatgatcgctatctgctcatacggctgctgctgccagctgatgccgcagcgggcgcccagtgccgaacgggaaccgtccgccgccaccagcagcttaccgttaatgatttcgccgccctcaagcgtaaggctgacgctctcctggctgcgactgaccgcttccactttcgccggacagtgcagcgtgacgcctggcgcctcgcgcagcagaccaaacagccgctggccgacatcgtggagttcaaccacctggcccagcgccgacaggccataatccgcggccgccagattcacaaacccggcatgaccgcggtcgctgacgtgtactcgctggatgggcgtcgcgcgttcggcgaggcgttgccagataccgatacgcgccagctgctggcaggtgcccgcagccagggcgatcgcccggtcgtcaaagccagggtggcgtgaagaatgcggatcctgcgcttcaatgaggtggaccggcagcgcgccgccggtcaaacgggagatggccagcgcgagcgtcgccccggtcatcccgccgccgacgatcagcacgctcatgactggcgcgccgccgccatcagcgcctcgatctcatccgccttcttcaccacgccggcagtgagattttcgttaccgtcttcggtaatcacgatgtcatcttcaatacggatgccgatgccgcgatactgcgccggcacgtcggcatcggtggcgatatacagtcccggctcgacggtcagcaccattcccggctccaggacgcgcgaacggtcggtgtcgtaattaccgacatcgtgcacatccagacccagccagtggctcaggccatgcataaagtacgggcggtgggcgttgttggcgataagctcgtcaatctcgcctttcaggatccccagccgcaccaggccggtaatcataatgcgcaccacttcctggttgacctgacagatcgaggtgcccggccgatagagtttcagcgcggtctccagcgattcgagcacaatgtcgtagatctcgcgctgcggctgggtaaatttaccgtttaccgggaaggtgcgggtaatgtccccggcatagccgcgatactcgcagccggcgtcaatcaggactaaatcgccgtcgcgcagttcagattcgttttcggtgtagtgcagaatacagccgttttcgccgccgccaacgatggtgttataggaggggaaacgtgccccgtggcggttgaattcatggagaatttcaccttccagctgatattcgaacatgccagggcggcatttttccatcgcccgggtatgggccagcgcggtgatctccccggcgcggcgcatcacggcaagctcttccgcggatttaaacaggcgcatctcatgcacaatgggccgccagtcgataaccgagttcggcgcctgcagattctggcgcgagcctttgcgcagtttttcgagggcgttgaacacaatctcatcggcataggcatattcaccctgggcgaagtagatcgcgtccagaccgttgagcagctgatacagctgctggttgatttcgctgaacgccagcgcccggtcgacgccaagcttcgccggcgcggcctcctggcccagacggcgtccaaaccagatctcagcggtcagatcgcgaacccggttgaacagcacgctatggttgtgggtttcatcgcttttaatcaacaccagcagcgcttccggttcgttaaagccggtgaagtaccagaaatcgctgttctgccggtagggatattccgaatctgcactgcgcaccgcttccggtgcggcgaaaatcagcgccgcgctgcctggctgcatctgcgccaacagcgtctggcgacgcgatagaaattcctgctgagtcatgacgccccctgaacgaattttagttagtgtaatgtcggtttgcggacttccggtgcggttggctgctgacgggcaaaggtgtcgtggcacagcagtgcggcaacgcggacatactcgataatctcctccagagacatctccagctcttcctgatcttcgtcttcatcgtagcccagctgggcaatattacgcagatcgtcaatcgcttccccggtttcatccttcactttatccagcttcggctggctaacgccaagaccaagcaggaagtggttgacccaaccggcgagggcgtcggcacggtcaaagacgctcaccgcatcgccttccggcagatacagttgaaagaggaaaccgtcgtcatccagtgaatcgctgatggcggaatgcatgttacgcagcgcctgagccagttcatggccaaaggcgagaccttcgttggtcaggtcgtgcaccagcggctgccagctgctgtccgtattgccgccgcacagcaatccgctgatcaaaccgtgcatttcggccggggtgagacctaccccttgttggttcagtaactggtatacatcgttgtaaccaggcatttcgttctgtatagacatgcgcattcgtcatcgttgggaggaatattcatggtatgctaccactttggaccctggtgaaccagaatagggcttgtatcttcgcaccagggtagctatagtgtcgccccttcgcagacccgggccagggtgtgaaggcagcgcagtcaatcagcaggaaggtggcatgtctgcacaacccgtagatctccaaattttcggccgttcactgcgagtgaattgcccgcctgaacaaagggatgccctgaatcaggcagctgaagaccttaatcagcggttgcaagatttaaaagaacgcactagagtcacaaatactgagcagctggtcttcatcgcggcgttgaacatcagctatgagttgactcaggaaaaagcgaagacccgcgactacgcttccagcatggagcagcgcattcgcatgcttcagcagaccatcgaacaagcattgcttgagcaaggtcgcataagcgaaaagccagggtcgaagtttgaataacactttgcagttaactgtgttagagtaatcgcaagaacaaaatttctctgagatgtttgcaagcgggccagtcccctgagccgatatttcataccacaagaatgtggcgctccacggttggtgagcatgctcggttcgtccgagaagccttaaaaccgtgacgacacattcaccttgaaccaagggttcaagggttacagcctgcggcggcatctcggagattcccttctttacttcgcatcatcccccatacgtgttttcggctgaagccgccctgtattacacttgctcctattgtttcgccagctcgtaacgagacctgcatgactatacagcccgataccctgctctcccgtcagcatattcgccagcagatccgcgatcgtcgacgcgcactcagcccggagcaacagcgcctgtttgcccaacaggccgccgagcgaatgatggcctggccgccggtagttctcgcccacaacgtggcgctgtttctctcctttgacggcgagctggacacccagccgctgatcgaccagctctggcgcgccggcaagcgggtatatctcccggtgctgcatccctttagccccggcaatctgctgtttttacactaccatccgcagagccaactgatcgtgaatcgcctgaagatccgcgaaccgaagctcgatgtgcgggatgtgctgccgctggctgaactcgatgtgctggtgaccccgctggtggccttcgatgtcagtggccaacggctgggaatgggcggcggtttttacgaccggacgctgcaaaactggcagcagtatcgcctgcagccggtgggctacgcgcacgactgccagcaggtggatagcctgccgagcgaagagtgggatatcccgctgccggcggtcatcaccccgggaaaaacctggtgttggtaggtacgcggggacgagaaattcagcctggaaagtattaacaaaaaaacgggcaggtacgcgacctgcccgagaggcaaaaatgattagaacagcagacgggcgcggatagtccccgggatcgctttcattgcctgcagcgcctgctgggcaacatcttcttccgcttcaatatcaatcaccacgtagcccatctgcggcgacgtttgcagatactgggcggcaatgttgatgctctgcgcggcgaagatttggttgattgcggtcaggacgcccggccggttctcatggatatgcagcagacgacggccgccgtgcagcggtagagaaacttccgggaagttaactgccgacagggttgacccgttgtcagagtatttcgccagcttgccagctacttccagaccgatgttctcctgcgcttcctgagtggagccaccgatatgcggtgtgaggatcacgttatcaaactcgcacagcggcgaagtgaaggggtcgctgttggtcgcaggttcagtcgggaagacgtcgatagccgccccggccagatgcttactggccagcgcatcgcatagcgccggaatgtccaccacggtaccgcgggaggcgttgatcagcagcgcgcccggcttcatcagcgccagttcttccgcgcccatcatatttttggtagaggcgttttccggcacgtgcaggctgaccacatcgctcatgttcagcaggtcggagagatgctgtacctgagtggcgttgccgagcggcagtttgttttcaatatcatagaagaagacgtgcattcccagcgattccgccagaatgccaagctgggtaccgatgtggccgtaaccgatgatgcccagctttttaccacgcgcttcgaagctgccgaccgcctgcttgttccacaccccgcggtgcgctttggcgttggcttccggcacgccgcgcagcatcagcagcagttcgccgatcaccaactcggccaccgagcgggtgttagagaacggcgcgttaaacaccggaataccgcgcttcgcagcggcgttcagatcgacctggttggtcccgatgcaaaagcaaccgacggcaaccagtttttccgctgcggcgaaaatctcttcagtcagatgggtacgggaacgcaggccgatgaaatgggcatcacggatcgacgctttcagctgttctgaatccagcgcgcctttatgaaattcaatgttggtgtaacccgctgcgcgaaggctatcgattgccttttgatgcacaccttcaaccagcagaaatttaatcttgtctttttccagtgataccttagccatttccccgtcctgttttgtcttaactgatgtcgtgctgaacgaaagttcgtctcagcaacatatcaaaaaaaactatcgcggcaatatgaacgtttgcgtcgccgtcctgaagaaatgtcatccagagggaaatcgcaggacaaaacaccagaaagagaagaaatggtagcgtgtaaatcagaatggttgcataaatgtgacagaagtcaccaaattgcacctgatgaaaaaatatttgcgagggagccggtcggctccctgcggacagactattttacgatggtcttcacgccgtcggcagtgccaatcagcgccacgtcggcgccacggttggcgaacagccccacggtgacgacgccaggaataccgttgatcgcgttttccagcgcgatcgcatcgagaatttccaggccgtgcacgtcaaggatcacgttgccgttatcggtcaccacgccctgacggtactctggacggccgcccagcttgaccagctgacgcgccacggcgctgcgcgccatcggaatgacttccaccggcagcgggaacttgcccagaatatcgacctgcttggaggcgtcggcgatgcagataaatttatccgcgaccgaggcgatgatcttttcacgggtcagcgccgcgccgccgcctttgatcatctgcatatggccgttgatctcatccgcgccgtcaacatagatccccaggcgatcgacgctgttaagatcgaagacggtgatcccgaggcttttcagcttctcggtggaggcgtcggagctggaaaccgccccttcgatctgccccttcatggtgcccagcgcgtcaataaaatgggccgccgtcgagccggtgcctacgccgacaatagtccctggctgtacatattgcagtgctgcccaacctaccgcttttttcagttcatcctgcgtcataattctggtccgagatgtgaatgcctgtggcgcattatagaacatcgatagtggaaatgtccctgcgatgcagatcacacaactgaacagaccaatttcgtctgtatcaaataaaaatttatgtcatagtgcgagataacgattagttatgggggcacgccagaataatgaaacgaccggactacaggacactacaagcgctggatgcggtgattagggaacgaggatttgagcgcgccgcgcagaagctatgtattacccagtccgccgtctcacagcgtattaagcagttggaaaatatgttcggccagccgctgctggtgcgtaccgtgccgccgcgccccaccgagcaaggacagaaactgctggctctgttgcgccaggttgaactgctggaggaagaatggctgggcgatgaacaaaccggctctacgccgctgctgctgtcgctggcggtgaacgccgacagtctggcgacctggctgctgccggcgctggccaacgttctgtcagactcccctattcgtctcaacctgcaggtggaagatgaaacccgcacccaggagcgcctgcgccgtggcgaagtagtgggcgcagtgagtatccagccgcaggcgctgccaagctgcctggtggatcagctgggggcgctcgattacctgtttgtcgcatcaaaagagtttgcgcaacgctatttcccgaatggcgtgacgcgttcggcgctgcttaaggcgccggtcgtcgccttcgaccatctggacgatatgcatcaggcgttcctgcagcaaaacttcgacctgccgccgggcagcgtcccctgccacatcgtcaactcgtcggaagctttcgtgcagctggcgcgccagggcaccacctgctgtatgatcccgcatctgcagatcgaaaaagagctcaacagcggcgaacttatcgatctcaccccgggcctgttccagcgccgcatgctctactggcaccgcttcgccccggaaagccgcatgatgcgccgggtgaccgatgcgctcattgactacggacacaaggtgctgcgtcaggattaaaccgcgggcataaaaaagccacttcgctgaagtggcttttttgtttctatcgcttactgggccggtttcggcgtttccgccggtttcgccggggtggctggagcagcggcttgcgccggctgcagctcaaagactacatcgacctggtcgtcaaactggatagtcgcctgctcgtaggtttcctgggcagaaaccggcgcagcgtcagcggccttcatcatgcgaaccatcgggctcggctgatagttggagacatggtagcgcacgctgtacaccggacccagcttgctgtggaagcctgcggccagctcctgcgcctgatgcacggcgtcgtcgatcgccgctttacgcgctttatctttgtaggcgtccggttgcgcaacgcccagcgagacggagcgaatctcgttgagacccgctttcagggcgccatccagcagaccgttgagtttatccagctggcgcaaggtcacttccactgtgcgcaccgcgcgatagcctttcagaatgcttttcccgttctgatagtcgtaatcaggctgggtacgcagattcgccgagttgatgtcctttttagcaataccgctcttttcgaggaaagagagatattgcgcaacgcgatcgtcagcctgtttttttgccgacgcggcgtcttttgccgacacgttcacttcgatcgccagggtggcgatgtccggaaccgcggcaacgcttgctgtgcctgaagtcacaatgtgcgggccatccggcaattcgctggcctgtgccgccatcgtggtcaatccgagtgttgccgccagggctaagacttttaacttcactgtcgtttctccatgttacttaaatcgcccttacgggacgcatgccagcaagcttagcgcgtacagcaggaaagtccatcggacaacgcttagttaagcaacgcctggatatggctgacgccttctcttgccagctgaaacgcaataaaccacatgacggcgccgaccacaatattgatgatccgctgagctctggcggtacgcagtcgcggcgccagccaggcggctaacagcgccaggccaaagaaccacaggaaagaggcgctaatggtccctagcgcaaaccagcgcttcggctccaccgccagctgacctcccaggctgcctaacaccacaaaggtgtccagataaacgtgcggattaagccaggtcaccgccagcatggtgataatgattttccagcgcccctgctgcattacctctgcattggcgagttcaagactctgactgaacgccgttttcaatgcgccgaagccatagcacagcaaaaaggccacgccgccccaggtcactagcgccagtagccacggggattgcatcagcagtgcgctaccgccgaaaatgccagcgcagattaacagcaagtcgctgaccgcgcatagcagggcaatcatcagatgatactgacgacggatcccctgattcatcacaaaggcattttgtgggccaagcggcaatatcatagccgctcccagggcaagcccctgaaagtaataagtaaacataaggatttatccgctgagttcgagagtggcgctgactatagcgcgaatgaattattagcggaaattgaaagaattaatcattaattagaacaactaatgatgagctattgaaaaaggccggcatggccggcctgagttattgagaggcgctttactctgctttttccggcaggcgcaccacatgaacatccatctgcgggtaagggaagctgatgccgttggcgtcaaattcacgcttgatacgctcgaggatatcccagtagacgttttgcagatcgctgcttttgctccacacgcgcaccacgaagttcaccgacgaggcgccgagttcgttcagacgaacggtcatttcccgatcgcgcagaattcgatcgtcagattcgataatcgaggtcagtagctgctttaccttgtcgatatcagcatcgtaagcgacgccgataataaactcattgcgacgcgcaggctccctggagaagttaatgatattgccggcgatgattttcccgttcgggaccaccactactttaccgtccgcggtacgcagggtggtggagaaaatctgcacgttcaacaccgtacctgccacgccgccaaggtcgacatactcgccagcgcggaacgggcggaacatcaccagcagtacgcctgcggcaaggttcgacagcgatccctgcagcgctaaacccaccgccaaaccggcagcacccagcaccgcaatcaccgaggcggtctgcacgcctacccgccccagggcggcaatcagcgtaaaggcgataaccgcatagcgcaccagcgcagagagaaaatcggccacggtagcgtcaattttacgcgccagcatcaggcggttgacggtattagagacgacgcgcgccacgatcatcccgacgatcaggatagcgatagccgcgacgatgttgacggcatagctcagcagcagctcctggttgcgtgccagccacgtcccggcgtggttgatgctatcgacaacgttcaaatcttccatttaacattccttatgaatcccctggggggaagtaaataactcagcctgcgacagggcagtcaggttatagggtaaacaataagtgcacgttttgccaaatggatcacagttttctgccgcgctatcctgttgttaagataataaaaaagcccgcattgctgcgggcttccgggtaagaaacagatttttcttacagaacgtcgatcgcgttcagctctttaaatgcctgctccagacgagtcaccatggaagtctgggcagcacgcagccatacgcgcgggtcgtagtatttcttgttcggctggtcttcgcctttcgggttgcccagctggccctgcaggtaagcttcgttcgctttgtaatactgcaggataccgtcccaggttgcccattgggtgtcggtatcaatgttcattttcaccacgccgtagctgacggagtctttgatttcctgagcggaagaaccggaaccgccgtggaacacgaagttcaggctgttgtgcggcaggttgtgtttcttggaaacatattcctgagagtcgcgcaggatggtcggggtcagaactacgttacctggtttgtacacgccgtgtacgttaccgaaggaagcggcgatggtgaaacgcgggctgattttgctcagctcggtgtaggcgtaatccacgtcttccggctgggtgtacagggcggaagcgtccatgtggctgttatccacgccgtcttcttcaccgccagtgcagcccagttcgatttccagggtcatgcccattttggccatgcgagccaggtacttagagcagatctcgatgttttcgtgcagggactcttcagacaggtcgatcatgtgggaagagaacagcggtttgccagtagcggcgaagtgtttttcaccggcgtccagcaggccgtcgatccacggcagcagtttcttcgcgcagtggtcagtgtgcaggataaccggcacgccgtagtgttcagccatctggtgcacgtggtgggcgccagagatagcgccgaggatagcagcaccctgaggaacgtcagttttcacgcctttacctgcgatgaacgctgcgccgccgttagagaactgaacgataaccggagagcgaactttcgctgcagcttccagaacggcgttgatggaatcagtacctacgcagtttaccgccggcagtgcaaagttgttttctttcgctacctggaacactttctgaacgtcgtcgccagtgatgacgcccggttttacgaaatcaaaaattttagacatgttacttagtcctgtatctgtatcttcgaccgttgaagaaggttcgcgagcccttaagcgcgctgaaaaacaggcgggtttccccgcctgaactgaattactgcttagcgcgctcttcgagcatcgctactgccggcaggactttgccttcgacgaattcaaggaatgcgccgccgccagtggagatgtaggaaattttgtcagcgatgccgaacaggtcgatcgctgccagggtgtcaccgccgccggcgatggagaaaccttcgctgtccgcgatagcgttagccacgatttcagtccctttacggaagttagggaattcgaatacgccaaccgggccgttccacaggatggttttggcgttcttcaggatttcagccagtttctgtgcggaaacgtcgccaaggtccagaatctgctcgtcatctttgatgtcgttaacagatttcagggttgccgttgcggtttcggagaactcggtcgctacgcgaacgtcggtcggaaccgggatatcgcaggtgcccagcaggcgcttggcttcatcaaccagatctgcttcgtacagggatttaccgacgttgtggccctgagcggcaacgaaggtgttagcgataccgccgcccacgatcagctggtcagcgattttagacagggaatccagaacggtcagtttggtggacactttagaaccaccaacgatagcgaccatcggacgagctggctctttcagcgctttacccagcgcgtccagttcagcggccagcagcgggcctgcgcacgccacgtcagcaaatttgccgatgccgtgggtggaagcctgcgcgcggtgcgcagtaccgaaagcgtccatcacgaacacgtcgcacagcgcagcgtatttcttagacagttcttcgtcgtcttttttctcgcctttgttgaagcgaacgttttccagcaccaccagttcaccggcagccacttccacgccgtccaggtagtctttaaccaggcgtaccgggttggacagtttgtctttcaggtaattaacaaccggcagcagagagaattcttcgttgtactcgccttcggtcggacgacccaggtgagaagtaaccatgactttcgcgccctgcttcagcgccagttcaatggtcggcagagatgcacggatacgtgcgtcgctggttactttcccgtctttaactggtacgttcagatccgcacggataaaaacgcgtttaccagccagatccagatcggtcatcttaattacagacatggtgaatcctctcgttgattcataaagttttgtcgacgtttacgcgtcgaacctgaaaccaatagccgccatcgctaacgtcgtgtcgagcattcggttagcaaagccccattcgttatcgcaccagaccagcgttttgatcagatgcgcgccactgacccgggtttgcgtaccatcgacgatggcgctgtgcggatcgtggttaaaatctgtcgagaccaacggtaattccgtatagtcaactataccatgaaatgcaccttgtgctgctttttgcagcaactggttgacttcacatgcttttaccggttttttcaccgtcacgctcaggtcaattgccgtcacgttaatcgtcggcacccgcacggcaatcgcttcaaaacggtcgttaaattgcggaaaaatacgggtgatccctgccgccagtttggtatccaccggaatgatcgactggctggccgcgcgggtacgccgcagatccggatgataagcgtcaatcacctgctggtcatgcatcgccgagtgaatggtggtgacggtgccggactcaatgccataggcgtcatcgagcagtttaatgatcggaataatgcagttggtggtgcaggaggcgttggagacaatgcgatgcccggcgcgaagttcatcctgatttacgccgtacaccaccgtcgcgtcgaggtcgttgccgccggggtgggaaaagagcacttttttcgcccccgcctgaagatgggcctcaccgtgttcacgactcccgtataccccggtacagtcaagcacgacgtccaccgccagttcgcgccagggcagcgccgcaatggtcggctcatgcagcagacggatggaatcgtcgccaacaaacagctgctcgcgctcctgacggacatcccaggcgaaacggccatggctggtgtcatatttcaataaatgcgcgatgcccgcggcatccgccagctcattgattgccaccacggtgatttccgcacgacgcccggattcatatagagcacgaaccacgttgcgtccaatgcgaccgaagccattaatcgcgatgcgaatggtcatagatctcctgcaaggctgtccctgttatgaggtggctgacagagtaatccagcaacgctctgaggggaaccttaccagctgcaaactgcgactgattgattaattgtcgaacatttaaacgactgaaacgcttcagctagaataagcgaaatgaggaataaaaggaatgtttgtccagcgcaataaaccagctatatgactcacatcacatttttgctggaataatttacaaccgtattacatggttcaggaatagcagatacaaaaaagccgggtggcgagataaaagcaaaacggtaacccaggggttaccgttttggtgtttgcaccctctcctgtgggagagggttggggtgagggcatcagcccgcaccgtaccagcgattacagcagcgctttcgctttagcgaccacgttatcaacggtgaagccgaactcctcgaacagctgctcagccggcgcagactcaccgaaggtggtcatgccaacgatagcgccgttcaggccaacgtatttgaaccagtagtcagcgatacccgcttccacggcaacgcgcgcggtcacggctttcggcagtacggattcgcgataagccgcatcctgcttgtcgaacgcgtcggtggacggcatggaaaccacgcgcgccttcacgccttcggcagtcagtttgtcccatgcggcaaccgccagctccacttctgaaccggtggcgatgaagatcagctccggctgcgagccggtgcactctttcagcacataaccgccgcgggccacgttcgccagctgctctgcggtacgctcctgctgcgccaggttctgacgggagaggatcagcgcggtcgggccgtcctgacgctccacgccatatttccacgcaatcgcggattcaacctggtcacacggacgccaggtggacatgttcggggtcacgcgcagggaagccacctgctctaccggctggtgagtcgggccgtcttcgcccagaccgatcgagtcgtgggtgtagaccatcacctgacgctgtttcatcagcgcggccatacgtaccgcgttacgcgcgtattccacgaacatcaggaaggtggaggtgtacggcaggaagccgccgtgcagcgcgataccgttggcgatagcggtcataccgaactcgcgcacgccgtagtggatgtagttcccggcagcgtcttcgttgatcggcttagagccggaccacagggtcaggttggacggcgcgagatctgcggagccgccgaggaattccggcagcagcgggccgaaggcttcgatggcgttctgcgaggctttacggctggcgattttcgccgggttggcctgcagcttcgcgatgaactcgttagctttcgcgtcgaagtcagacggcatctcgcctttcatacggcgggtgaattcggctgcttcctgcgggaaggctttggcgtaagccgcaaacttctcgttccatgcggcttctttcgcctggccggcttctttggcatcccactgggcatagatgtcagacgggatgtcaaacggcgcgtgtttccagcccagcgcttcgcgggtcagggcgatttcggcgtcgcccagcggcgcgccgtgggagtcgtgggtaccggctttgttcggcgaaccgaaaccgatgatggttttacacatcagcagggacggtttgtcggtgaccgcccgcgcttcttctaccgcgcgtttgatggcgtcagcgtcgtgaccgtccacgccgcgcaccacgtgccagccgtaggcttcaaagcgtttggcggtgtcgtcggtgaaccagccttcaacgtggccgtcgatggagatgccgttgtcatcatagaacgccaccagtttacccagtttcagggtaccggccagggagcacacttcgtgagaaatgccttccatcatgcagccgtcgcccatgaaggcgtaggtgtagtggtcgacgatatcgtgtcccggacggttgaactgcgccgccagggttttctcggcgatagccatcccgaccgcgttagcgataccctggcccagcggaccggtggtggtttccacgcctgcggtgtagccgacttccgggtgacccggggttttggagtgcagctggcggaagtttttcagctcttcaatcggcagatcgtagccagtgaggtgcagcaggctgtaaatcagcatcgaaccatggccatttgacaacacaaaacggtcacggtcagcccaggccggattgttcgggttatggttcaggaaatcacgccacagcacttcggcaatgtcagccatacccatcggggcccccgggtggccggatttggctttctgtacagcgtccatgctcagcgcacgaatagcgttagcaagctctttacgtgaggacattttgactccagttcggactgttgaaggccatgcccttaacgacttgacgagagcgcgttttgggctacgccggaaaaaagtgtgaacaatgtaacccaagcgacaagtcatgtacatggagcatccttttgccctttaagaaatctctggaacaggttgtgctacgccggaatccgctcgcccgcatcctgcgatactctttataatttacgcagaatacggttccctgccgtcgccgtattttcggataaacaaccataagattgtggaagataaaaatgaaaattcgctcaaccgtacttgctcttgggatcgcagcaaccctcaccggatgtcagaacatggactccaacggtctgctcagctcaggcgccgaagccttccaggcatactctctcagcgacgcgcaggtgaaaaccttaagcgaccaggcctgtaaagagatggacgccaaagcgaaaatcgccccggccaacagtgaatacagccagcggctgaacaaaatcgcggctgcgctgggcgataacatcaatggtcagcccgtgaactacaaggtctatgagaccaaggatgtcaacgccttcgccatggccaacggctgcatccgcgtctacagcgggctgatggatctgatgaacgataatgaagtcgaggcggtgatcggccacgaaatgggccacgtcgcgctgggccacgtgaagaaaggcatgcaggtcgccctgggtaccaacgccgtgcgtgcggcggcggcctccgcgggcggtatcgtcggtagcctgtcgcagtctcagttgggcgatctgggcgaaaaactggtgaactcgcagttctcccagcgtcaggaatcggaagcggatgactactcttacgacctgctgcgtaagcgcggtatcaatccgtcgggactggccaccagcttcgagaaactggccaagctggaagccggccgtcagagctctatgtttgacgatcacccggcatcggaagcccgcgcgcagcatattcgcgatcgcatgaaggccgacggcattaaataagcgacagcgggaggcgttattgcctcccttttttatatatccgtaaaaatatttagccgcattaattgataatttaagcgcacaaaccgttaattattatcacagcgcatcacagccaattattttatgcccggcgattcagaaatatattatttggtaaattaaaaaggccgcacactatctggcttccagaatcgtctttacccgaataataaatagtccaccccttactgcctggcgcacggctcatgcaccatacaacctgtttccggctgcaataactgctcacacaatgattgctttcgacattatttcaggagaatatctggtcagcagtgattcccttgaatatatcgacagacagagaagtgccctcagtgaaaaaagaattaccattaatcgcacttggcattattgccgccgcgccggctttcgccagccaacaatctaccagtcagggctttattgaagacagccacctggatctctttttacgtaacgcttatatcaaacgcgattatcgcgatggtttgccggataaagccgaatggggtcagggtatcatcgcgaccttcgagtccggctttactcaagggccggtcggcttcggcgttgacggcattgcacagtacgccgtgcgcctcgacggcggccgcggccgcagcggcgcgggcggtatcgactttttcgcccaggatgatgatggccgcgcgaagtccgatttagcaaaatttggcgctaccgctaaaatgcgcttctcgaataccgtcctcagctacggcagccagcgcccgatgctgcccatcgtctacgccgatgactcgcggctgctgtacgagagctataccggtaccatgctgacctcaagagaaatcgacggtctggaaattaacgccggttatctcaccgatcagcagcgcaaaagcgacgacagccacaatagcggcctgaagagcctgacctttggcggcgccagctatcaattcaacgaccagctcagcggcgcgctttacgcttcgcacgtcgaagacgtgctgaataagcagtatctcggcctgaactacaagcagccgttcgccgccgaccagcagctgattgttgacttcaacggctataactcgcgcttagatcaagaatatgccgacgccaatgacaccgggcgcagcaacagcatctggagcctggccgccagctatatctgggatattcacacttttaaggtcgcttaccagcaaagcagcggcagcaccggctaccactacggcgggtatcagaatcagggcggcgttggcgatggcggcaacaccatctggctggctaactcctactggtcagattttaacggcgaggatgaacgttcctggcaggcctcctatggcctggattttgccggactgggcgtaccgggcctgagctggaccaccgcctacgttcgcggggataacattaaaaccgccgagaccagcaacggtaaagaacacgaatggttcaaccaggtgcagtaccaggtgcaaaacggcatggcgaaagatttgaaattgagactccgctattcggtgctgcgcgtttccagcaacgccagcgactataacgtcagcgggaatgaagtgcggttctacgtcgaatatccgtttaacgtgttttaaccatataatgaaccctctccagtgagccggccctctcccggcgcgcaggagcaaccgtccggcgccttgattaaccccctgtgccgtgcggtaccctctccccggaagggagagggttggggtcactgggttatcattaatacagcgtcttctgcggcgggccggcaaagcgcagcgcgccaatctggcccatcttcacttccaccaccgatggccccggcatcgccagcgcttcggtcatcaccgcctggaaatcctcagcccgatccacgctccacgcctgcagacccatcgcctgcgccaacagggtaaagtctggcgagtgcagctcgttgtaatactggcggccgccaaaatacttatcctgaataccgcgcattacgccgtagccgccgtcattcataatcaacagcgtcacgttggccttctcctgcgccagggtcgccagttcgccaaggttgaggctcaggccgccgtcgccgaccaggccgaccactttacgttgcggattggcaatcgcggtacccaccgccatcggtagccccataccgatggctccggccagagaatggatattcatcagcgggccgtgagcgcggaacagacggctgccccacaggctgccggaaacggtaatatcgcgcaccaggatgccgtcatcgggcagcgcctgcgcaatcgcgtcattcaatttagcgtaatcgccgcactggtcgcgcagcccccgctccgccgcctctaccgcctctttaagctggctatcccaacgcgcatcgccccatatccggccctgcacccgcgctgccagcgccgctaatagcgcccggcaatccgccaccagggtattgtccatcaagtagttacggctggccgccgccgggtcaatatcaatctgcacccgcggcgtgggcagttccagcgtccacgagcgcgtttcgttgctgcgcagccgggaaccggcaacaagtgtgaaatcacattgtgaaatcagcgcttcaaccgagggagaattatgaaacgcgcgcaggctggcgcgatggctgtccgccagaatgccgcggccgtgggtactggaaatcaccgtcaccccggcatccgccagcgtcttcaccgcctcgccgctctctaacgcgccgccgccaagccacagcagcggctgcttcgcctgcttaagctgcgcccacagcgcatcgaccagcgacgcttccggctcaaccgccggagcgcgtttcagcggcgcggtcagcagtgaaagcggaattttggcgctctgaatgtcgattgggatctccaccgagaccgggccgcacggcggcgtctgcgcctcctgaatcgccttatgcaggatagccaccgcctggttggcgttgctaatgcggtaagcgcgcttcgaactggctttcaggaaggtcaattgatcgcgggtttcatgaatgaaaccggtgtcggcgtccagccaggctttttcgacctgtccggtcaggtgcagcagcggcgtaccggcgttcatcgcctcaaccagcgcgccgaccgcattacccgcacccgcgccggtactggtcagcgccacgccgagccctgaaaaacggccgtgggcgtcagccatggtcaccgagcccgcttcaccgcgcgccggaacaaagcggattttttcccgctggccgacggcatcggcgatcggcaggttatggatagaaatgacgccataaatggcttcaacgtgatactgctccagcgttctggcgatggcatcgccgacggttatcatttcgctcattgctcaccctttctcagtcgcaccagtggttgacgctattacccgtcgccagataaatgctcttttgttgcatccaggctttcagcccctggatccctttttcgcggcccagaccgctctctttaaagcccccaaacggggtcgaaatggagaaaactttgtaggtgttgatccacaccgtaccggcttccagttgttcgctcagacgcagcgcgcggccggtatcacgcgtccagatccccgccgccagtccgaagaccgaatcattggcctcgcggatcagcgccgcttcatcgtgaaaacgcatcgccaccagaaccggtccgaagatctcttcctggcaaacgcgggcctgattgttcagcccttcaatgatggtcggcaggaaatagctgcctgccgccagcgccggatccgccgggatctcgccgccgcatagcacgctgccgccttcgcgtttcgccagctcgacgtactccagcacgctctgccggtgtttatcgttgatcagcggcccgacgtgggtgccagcgctgaacggatgaccaacccgcagcccttgggttaactccaacaggcgggccattaattgcggatacactttgtcatgaacaaacagccgcgagccggcaatgcaggcctggccgccggagctgaaaatgccgtagcagatgccccgcgccgcctgttcgatatcggcatcttccagcacgatggtcggcgatttgccgcccagctccagtgacgccgggatcagcttttccgccgccacgtgcgccaggtgacgtccggtggtggtgccgccggtaaaggaaattttgcgcaccttaggatggcgggccagcgcatcgccgataatcgatcctttacccggcagcacgctcagcagtccggcgggtaaaccggcctgctcaaagatcttcgccagctccagcgccatgagcggcgtggcttccgccggtttgaggatcaccgcatttccggcggcgatcgccggggccaccttctgcatttcgctggcgatcggcgagttccatggggtgatcgccgccaccacgcccaacggctcatagcggctcagagtcaatagatccgcctgccgcggcgtcggcagctcgccttccagtaactcgcaggcggcggcaaaatagcgcgccgtccccgccgcgctcatcaccagccctcgcgcttccgccagcggtttaccattatcgcggctctgcttttgggtgagctcatcaagctgtgcttcaatcagatcggcgactttatgcaggatcttcgcccgctgatgcggcagcatcgcccgccacgttggctcccgccaggcgcggtcggcacagtcgatcgcctcctgtaaatcatcgaggcttgccgcatgcagcgccgcgttaatagcgccatccgccggaaactggctgtgcatcaaattgccgccgccgcgacgccactgaccgccgataaaaatgtctaattcgtccatctcagcctctctgcgttatgccagttcacggcaggcgcgtaccgcgctcagtgccgcgagggtcgatgttttcggattgctggcgagcggcaggccgctcagctccaggtgaaactcgccgaacaatccttcggcgtgtagcgtatgggtgttacgttgcgtcgccggatcgaccatcagctgtactcgggtcgcgtcaaggccgataccgcccagcgcgatggttgccgccacgttggcatttgccgggaatagccgcgccgcctcgcgggcgctgccttcgaagaaaatttgcgcttcattgaccgcgctgaggtcgataagctgttcggcatagctgccgcgccagctggccgggcttttacgcgactgataggtcactcgttcaagccccccctctttggccgccgccaggccgtcaatcccggctactgcgccagccagcagcgtcaacttgccgcccgcctgacgtaaacgctgttccagttcgctgtccgccaacgcaccggtcgagatcaccgccagatgccagccgcgcgccagtaccgcttcgccgtattgcgcgaccgcctgctgactggcgcattccagcaccagatccggcgtcccaccgcattgcagcggatcggtaagcggcgtcaccgcttgaccaaactgcaggcagatcgctgcgtgatgcgattcgcgcgccacgatccactccaccctcacctgcggcggcaggcgttcaatcaccgcctgggccatcgcgccatagccaattaacatgacctttttcatcatctttccttacagatggcgacagaaaccgccggaaacgtccagcgccgcgccggtggtaaaggaggccagcggcgaagcgaggaatagcagcgcttgcgctggctcctgcggcttaccgagacgcgccatcgggatcccccgcttacgggcgatatcggcggtccactgctgccaactctggctcttatcgcttcggctctcaaaacggcgctgccactgcccggactccaccatccccagcagaatggaattcacacgaatacctttatccaccagctctttcgacagagtcagcgtcatattgagcagcgcggcgcgggcggcagaggtggcgatcatgtgctcttccggctgtaacgccagcagcgagttcacacaggtaatcgaggcgatatccgacgcctctagcagggactgaaaggcctttaccgggttaatcacgccgaacagtttcagttcggcttcgtgcagccaggcctcacgtggcgtatcggcgaagtgggcgacatagccctggccggcgttattaatcagcatatcgacgccgccgaaacgcgcggcgaccgcggcggcgaacgcctcaacttcagcttcgttcagtacgtcacagcgccaggagaacacctcaccttctggatattcgttttgcaacgccgcatgggcgctggcaagccgatccgggttgcggccgcaaaaggcgactttcgccccttcgcccagcagcaggcgcagcgtttcaaagccgattcctgacgaaccgccggtgactaccgcgacgcgcccttcaatttgtgcattcatcgcgcacctcttcccctatgcgtaaaagctgttgattaaaaaagatttcgttatcgagatagctggcatgtccagcctgagggatggcgatgtaaggagcgccgtaacgcagcgccactccctgcactaactccggttgggtaatggcatcctgctcgccacaccacacggagagacgaccgcgatagtcggcgagccaacggtgaatgtcgtcatgggccagcatccaggccgcggcgagataaccgtcgcggcgtagcctgcgcatccccgccgccaccgtcgccacatcggcttcgcgcgcgccagggcgcagcagttttgccgctcgcccctgggccatcgcctcgccgcccagcgctatctgctgttgacgcccctgccagactttttcccgctgtgcggcttccgcctggccgtagccctgcgcgacgtcggcgagcaccaggtaaagcaccctctgcgggtatttcgcggcgaaggcggccgccaccagcgcgcccagcgaatggccgaccagtatggtttgctctactccagcgcggtccagcattcgcgccagcgcgtcggcgtaatcgccggcattcgccggcgccgccgccagcatcgggctttcgccataaccgggcatatcccaggccagcacgcggtagccgggtagcgccatctgtttatgccaggaggccgcgccggaactgatgccgtgcagcagcgtcagcggaataccgcttccttgttcacgaaaccccgtcatcatcgccccttagttacgttttacttttgccagcggatgatcttccgggtaggtcggaatatgcggcttatgggtgccgagcatcacgcacatcagcgcctcttcttcgccgtggttaaacaaaccgcggtaaattccaggcggcaccgagatcagatcgcgttcgcgcagcacggtttcggtatagttgtcgccgtcctgaatcatcagagtgatctgccctttgagcatgaagaacacctcttctacgtcatcatgcaggtgcagcgggccttcacatttggacggcaacaccatggtggaaaaggtgaagtgctcggccggaacggtgttggtatcactggcgacgccggtggcgccggtgccgatgtagcgcatctgcgcgcggcgatatttcggatcgaaatcggcctggaatttcagcgcattccagtcatatttgcggccttcaaagcgcgcgatacgcgactccacccactcttccatcgtcaaatggtcaggtttcaaactctgttttgcagttacggttgaatcagtcatcgttttatcctcagtagcgtctcagcagcggcagtaacagggcgcagcccaccgccgccatcaccgccagaaaaatcagcccggaatccatgctatgggtgaaggcgataagcgcgcccatcaccgccggcgatagcgccccggcaaagtttcccagcccgttgaaaattccacccgccgtggcgctgacccgtggatgggtcgctttagccagcagcgcgaaaatgtttggcgcgccggtgccccacataaaggtgctaaagctcatcgccgcgattaccggcagcggcgtggtgaaatgcatcactgccgccaggccaatacccgcgcctgccagggaaataaagcaggcggcggcgcgcctatcgacgcggtcggacagccaggcgccgataatttcgcctagcaacatggcgataaatggcatcgacgacagccagccggcgtgttccagatgaatgcctttgcctttaatcaggtagcccggcagccagccgttgatcccccacagataggcgagaaaggcgatgttgaagatgcagatcatccaaaaatgcggactcacaaagagctcgagacgcgcgctgcggcgcgcttcctgcgaggttttatctctgctcgctctcgcctccagttgtacgccgcgcagcccgatgcgtacaaaaatcagcaccggtatcgtcagcatcgccatcacgaaaaatgtgctctgccagccgaaggtattgagtagccaaattgacagcgggaaacccagcgccgcgccaaccggcgtgccgagcagccacagcatggtggcgcgggcctgtagccgctgcgggaaggtgtggcgcaccacggtgaacgccaacggaaacagcggcccttcagcaatgcccaacaggatgcgcagcgtcaccatcagcgcgtagttgtgggtgaagcccatgatcaccatcaggatgcaccacaccaccatcattccagtcagcagacgcagcggcgcaatccggtcgccaaggccgcttaataacactgacgagaagccgtaactcagcaaaaaggcactcatcagaatgcccaaccgggtggtgtcgaaatcgatgcccatcgcctgctggaagtgactatcggaaaacagcgcggcgatactgattttgtcgaaaaaagccagcagcacgcaggccagcagcgacagcggaatggcccaacgaactgctttttcaggcgtgcggacgccctcaccgctcgcctctgcaggcgcggcgttggtctctaatgtggtcatttctcccccttaagggttcgcgtttcttatcgcaatgacatcagcgagaaagttgggtcagcgagcgggacgttagagagatcccttcccgccgccatccagcgcttcgccagcttcacgatacgtgcattattgaaggccaccagctgagttaagcgtccatcggcattcagggagaagtagatcgcgccctgcggctcgtcacgcacaatggtccggctgcccgcttgcgggatcccgaggatctggatattgcgatcgtattgatctgaccacagccacggcgcctcgtcgtagccgctggcctgtggatcgagcatcgctttcgctgtcgcgatggcctgattttgcgcaaaggcccacgactgaatgcacagaccgtactgatggtgctgggcgacatccccagcggcgaaaatcgccggatcgttactgcgcccttgggcattaacgacaatcccgcgatcgacagtgagcccggcatcgcgcgccagttcgagattcagatcgacgccgatccccaccactaccgcatcgaaggtttcccgctggccgtcgcagtgcagcgtcggcaagccgttatcatcttccagctccagcgcgccgcagccgcggcgaatatcaacgccctgcccgcgatgcaactcatccagcgcctgcgagacctccatactgaccgagcgcatgcacagcgccggctgctgttcataaagggtcacggctacgccgcttttgcgcgccgaggcggcgatttcgaggccaatccagccgccgccgacgatcgccagccgcgttgccgatgccaaccgctgcttcagacgctgcgcgtcctgccagtggcgcagggtatatacctgaggatgctgcccccaggcctcggacggcagccgcgcgcggccgccggtggcgatcagcagtaggtcgtacgccagcgtttcgccgttgctcagcgccagggttttattttgccggtcgatcgatttcgcgcgcagcgggcggtaccagcgcagatccagtgcctgctgcacctcggcgctgaataaccgcggcagcgccggttcggcctccagcaatgccgctttcgacagcggcgggcgctcgtaaaaatcccattgctcttcggcaaccacgcaaatctcgccgctaaacccttcatcacgcagcgttttcgccgcccagccgccagcctggccaccgccgataatgactatccgcgccgtcataccgcctccggttttttctgctggcgacgggtatcgtgatcgataccgccttccaccgcccattcggtaaaggacacgagtgaatgctcaagctcgcgcggctgccagttttccgtcagatagtcatcgttggtgtagtactcaaaagcgccgccggtcgggctgttgacataccagaagtaggccgaggagaccggatggcggccgggaccgataaacgtgctccacgcgtttttattcatcgcaatgccgccgccgatcacttcatgaatatcccgtacggtaaacgcgacgtggtttagcccgcgcttgcggttgggcaactgcaataagaagaggttatggtgtccgccgcgcacgccgcagcgcaggaacaccgcgcgattgatgtagcggtctgacacctgaaagccgagtacttcgcgatagaaactttccaccgccgccagttcttccacgaagaacaccacgtggccgacgttaatgggctgcgcgcggtcgtagaccgggctcggggtgtcgatgcgacgcacatcgccccactggttgatcggttcaacgttcagttcaaccgccgtttgctggctaacctgcacccgcagcgtcataccgttgggatcgcggcactccagcgcgccgtcgatttcacggaaagcgggctggcgttccagcttcgggcgcagcgcatccagcgccgcccgatccgccacgccccaggtcatgcgacgcagggtgttgcccgcctcaaaggctggcggtaagttggcggcatcggtcgggttaagttcgacccgcgcgccgctgagggtggtaaacgcgcggccgctggcgtcgccggtcaggccaaaatcgcgcatgaatttagcgctgtggttcaggtcgtctacgccaaattccagcttttcaattccggtaatactcattattcgtcgcctctttaccgttcagtcgcccgaatttgggcgtaaaacatgcccgacgcaatcaagcgcctgctgttaagttgttgatttaacttgcctgtgacaaatatccgaggaagccggaaattttgtccgccgccatactgacgtcgttctgcaaccgttcgcgatcgctttgcgggatctcgtccgacggcaccagaatgctgacgaccgccgccacccggccgctgcggttaaagaccggatagacaatcgatgagatgccgtggcgatagaacgattcgccaatcacgtagccgcgggctttatcctgctgcaccatctgccacagcgcttcgcggtcgtacagctggcccggcgtattgcccggcagacgttcattcgggaacaattgttcaaactcgctgcgggaaacatcggtcagcagcatgcggccaagcgaggtgcagtgcaccggtagccgcgttccgacgctgacctggttgatacgcgaaccggcggcgctgacgcgggcgatgtagataatgtcgcggccgtcgcggatcgccagatggctgctgcactggctgatatcgcgcagttgctcgatgaccggctgacccacctgagcgacatccagtgaggcgatatattcaaagcccagacgcagtacgttcatgcccagcgaaaaggtattggtgcgggcgttgcgctcgagaaagcccatatattccagcgtctgcaccacgcgataggcggtcgctttcggcatatccaccagccgatgcagctcggcaaaagtcagatcgcgatgctgttcgccaaacgccagcagcagttgtaaaccgcgctccagacccggtaccaggtacttcacttcctgatcgttcgccataccgcctcacttgttagttaaagacaaaaccgccgttgaccgggatcagttggccggtgataaagcgcgaaagatcgctcagcagccagaccacgctgccggtgacatcttccggctgctgcgcgccgctgagcgcgcggccgttctcatacagctgatgacgctcggcgggaacgtattccgtggcctcaacgcgggtcagtcccggcgcgatggcgttgatacggatccgcttttcacccagctcgcgggccatggagcgggtcatcgcaatcaccgcgcccttactggcgacataggccatcagccgcggcgcgccccacagcgcggtatccgaagcgacgttgacgatcgccgccccttcgcgcagcagcggtaccgccgcgcgggtcaccaaccaggtgcctttaacgttgaccgtcattacccgatcccacagatccggatcgtaatcgatcatattttttccgccgacgccggtggccatcgctgcgttattgactaagccatcgatagacccctgcgcgccgatggcgctgaagacctgctcgatcgatgcttgactggcaagatcgatggcgtgagattcgacctgatagcccttctgctgcaggcgatgagcgctttccgccagctctccctgcaggatgtcgcacatcaccaccgtcgcgccctgagcggcgcaggcttcggcaaagtggtacccgagaccgcgcgccgcaccggtgacgacaatacgtttaccgtttagcaggccgttcatcaggcggcaccctgctgcgcttcgcggagcgctaactgctctttcgccgctttctgcatcatgcggcgcaggcgggacagaccgacgtcatgttgataaaggtattcatgatcgcgggcgttcggcgccaggctttccagcaccacgcgatcctgctccagtacttcccagtgcagtttttccagacggttgcggtacataaagcgccacagatcgcgctgccagccctgaacgccgcggatgcgccagaagaagacgcgacagttatcgttatcttccggaaccaccatgccgacgatccagaagtggccgcccggcccgaaacgctttttgtacggaatagacagacgcatccagtaggcgccgctgttgcccagttcaacccagtcaaagttaacgccgctctgcccttttttctcgaagataaatccggttttcgtcggctgcaggaccatatcggctttgcgatcgccttctgccatcgagtgcgatgatgagtgcaaataggtgccatgcatcgggtccatcacgttttccagcgcgtactggtagttgcatttccacgccgcggtgcacaggaagttactgtatttttcgctatcggctagttcctcagggaagctcaattcatcaggctgctgatcggcggtgacgccaaaccacaggaagattgccccgtgcgcttcgtgcacgctgtagctgcgcacgcactgctggccgaccagcgggcagcgatccaccgccggaacgtctttcacttcgccgttgccggcgacttccacgccgtggtaccagcaggcgatacgatcgcctaagttccagcccattgacaggcgtgcgccgcgatgcgggcagcggtcttccagggcctgcacctggccatctttattccgccagaccacgatctgctcgccgagacgggtaatgcctaccggcgcagactgcacttcccagctcgccagcaccggataccacaggccgcgcagtcctttatcaagatagttttgtaccgttgtcgtcatcgctgtgtcctcagtagccgttaacctgtaaaaatgcctggaagctgctttcgctccacggttcgccctgttggtcatgcatcctgacgccattgaggccgttcaccagttcaccgagactttccgcgccctgctcgaacaacgtttccagggtggcgataagctgcagttcccagttttccggtacccggctgcgggtttgccaaatcagattgtgatagtcgccaggcttatggatattgccgtttccgccttccgccggtggcgtaaactggcggctttccggtagcgccgggttgaagtccagggattcgctcatgccacgttctcctcgataaaggtaatctggatctgattgtcgtatacccgcaccgggtaacgattaaggttgcgaccgccgggtccatgcaggcactggccggttttgacgtcgaataccgcctcatgcagcgggcattccaccttgccatcttcgacaaagccctggctcaggagcgcataggcatgagggcaaacgtcttccagcgcgtaatattcgccatcaatcagataaataccgatttccttaccgtcgatattgccgctatatgggaaatcttcctgtacttgctccgcgtcacatacgcctatccagctcatcgcaatcctccaggcttttgtttcatatatgaaactctgtttcttatttaatacggtcaatataaaagcggtgaatgtttcgtcaagcattaatgtgacgaatttgttaatgagtggcttttaaattagctaagtgtgcaattgatcacgaaaaactgcattcagatgaaatgatgatatttaaagcggtgatccattataaataaaaatgccgatttaaatttcacatacgactattgacttcttttcaaatcgatcattaaaaatgggcaacagcggaaaccatggtgtttcacccatgaaacagctatttatttaatcatttaaaaacaatgagtttcataggtgaaccattttactcatgtaactatttctggcgttaaaaaataataactggcaatcattaaattaagcgtggagacaacgaatggcggcaagatggcaagggataatagcattacttttgttaataattatttcctacgtcgatcgggtaaatatctcggtgatgatccttaacccggaattcgctgcccattttcagttaaatgaaaacagaatgttacaaggtatgctaatgacatgctttcttctgggttatggtttttcggcattattattaaccccagttatagaaagtagatggcattatcgtcagggactcttaagcagcattgctatatgggcgctggtgtgcgccatttccccgctactcggctcactgctgggaatgttgatcgcgcgcatcgttcttggcgtggcggaggggccgctgttctctctgaaaacgcgctttatcaacgacaacttcgccgctgatgaaataggcaagccgaatgcgctgaccgcccttggcgtatcgttggggctggcggtaggcttcccgctggtcacctggctgatggtgcacgttggctggatcggctccttctacgcgctggcgctgcttaacctgctgctcggcggcggattaatctggcggtttctccccgcgccacaagtaacctcacagcgcgcgaagccgggtttcaggcagactttcgccctcgcctggcgtacgccgctgctaggctggatcctgctggtagaaatcgccacgctcagctatctgtgggggagtagcgcctggttgcccgcctggctgcgcgacgagcaccacttctcgctacaggctaccggcctgctggcggctgtcccctttctgttaagcctcggctcaaagtttcttggcggcgtgctcctcgacaaaatgcgcccggagcaggcgccgctgctgtttattatcggcggcctactcaccgccggttctgtgctggcgctgatgctcagccagcagccggcgatgctggcgctgtttatgctggcggcgaacgttttctggggattacagggggcagcgatccccgcggtggttcagcatcacgccccgcgcgaagcggtgggcagcgcctatgggatcattaacggcattggcaatatttgcgcggcgtttattccgctgctgatgggagtggtgatgaaatcggtgggatcggtcagttcaggtttttccgttctggtggcatcgcagctgatcacgctgtgcgccggcggcgcactgctgctgcgtatgcgtcgcgcagcagcagtaaacgcgtctataccctaaataagttgcaggacaaaacggctagtcgttttgaacagcgcttgcgctggccccgtaaggacgaggcccagggatgggccgatttattgccaacgcctatgcaacttgaagtatgacgggaacagatttattcgccctttttcgccgcctggatgtacagcatctccagcgccagggtcgccgccgccagagcggtaatttcggactgatcgtaggccggggcgacttccaccacgtccatcccgacgatgttcaggtccttcaggccgcgcaccagcttgatcgcgcggtcggaggtcagcccaccgataaccggggtaccggtgcctggcgcaaacgccggatccagacagtcgatatcaaaggtcaggtacaccggcatgtcgccgacgatctgcttcacctgggcaatcacgtcatcaacgctgcggtcgttaacctggccggcgtccagtaccgtaaagccattgtctttgtcgaactcggtgcggatcccgatctgtacggagtggttcggatcgataagcccttcgttcggcgcggtatagaacatggtgccgtggtcgaactcgcagccgttggcgtaggtatcggtgtgagcatcgaagtgcaccagcgccattttaccaaagtgcttggcatgggcgcgcagcagcggcagggtaacgaagtggtcgccgccaaaggagagcatacgtttgccggccgccagcagcttctcggcgtgagcctgcagcttctcgctcatttcgcgcgcgtcgccgaaggcgtacaccagatccccgcagtccaccacgttcaggcgctcgcgcatatcgaagttccacgggaaacggttgtgctcccaggcaaggttagtggaaacctgacggatcgccgccgggccatgacggccgcccgcgcgcccggaggtcgccatatcgaacggcacgccggtgatgacccagtccgcatcgctttcatacggcataaagttcattggcaaacgcagaaagccaaaggcattggataccagggagttatcgtattgatgacctaaagtgctcatggatatgacctcttttgacagtcgtggaacgtaaaaaataagtataaaaaaacccctccgcgtcgttaggcccgacgaggaagggtttgatagataaatcgcttattggcgtgaattatcgccggtaatgcatacgggttcaagtgagtatcgcatgctgccggatgacggcttcgccttatccggccgacatacgcaggcccggtcagcgcagcgccaccgggcatcagcggctactcgtcttccagataagtatagccgtacagtcccgcctcgaactcctcgaggaactgctgctgcagcgcatcgtccagaccggtatttttcacctgatcgcggaactgggtcagcagcgtattcggatccagctgcacatactgcagcatatccgccacggtatcgccctcgtcggacagctcaacctcaacgctgccgtcagggaagacgaacacgtccaccgcctcggtatcgccgaacaggttatgcatgttgccgaggatctcctgataggcgccaaccatgaagaagcccagcatcggcgggttctccgggtcgtattccggcatcggcatggtggtggcgatcccgtcgccgtccacgtagtgatcgatggcgccatcggaatcgcaggtgatgtccagcagcaccgcgcggcgctcaggcgacttgttcagcccttccagcggcatcaccgggaacagctgatcgatcccccaggcatccggcatcgactggaacaacgagaagttgacgtagattttatccgccattcgctcctgcagctcatcgatgatgggacgatgggcgcggttgctcgggtcgagctgcttctgcacctcatggcacatgttcagatacagctgttccgcccacgcgcgctcctgcaggttgaaggtgcctgaggagtagccgatgtggatatcgtgcaggtccatctggctgtcgtgcagccattcgcgcagcgagcggcggttgccggtctcgtgcatctccagccaggtttcccacatgctctgcagcggacgcgcagcgtcttccgccggcggggtcgcctcggtgtattcgttacgctccacgccgatgatgttggaaaccagcacggtatggtgcgcggtcaccgcgcggccggactcggtgatcaccgtcgggtgcggcaggccattctcttcgcaggcatcgccgatcgcccagatgatattgttggcgtattcgttcagaccgtagttcaccgagcaatcggactgcgagcgggtgccttcatagtccacgcccaggccgccgccgacgtcgaagcactgaatattgacgcccagcttatgcagttcgacgtagaaacgcgccgattcacgcacgccggtggcgatatcgcgaatgttagccatctgcgaaccgaggtggaagtgcagcagttgcaggctctcaagatggcctgcctcgcgcagaatttcgaccagttgcagcacctgggtcgctgcgaggccgaacttggacttctcgccgccggaggactgccatttaccggagccctgcgaggccagacgcgcacgtacgccaaggcgcggcaccacgttcaggcgctcggcctcttccagtacgatagcgatctcggacatcttctcaatgaccagatagaccttgtggcccatcttctcgcccaccagcgccagacggatatattcgcggtctttataaccattacagacgatgacgctgcgggtcatcccggcgtgcgccagcacggccatcagttccgctttcgaaccggcttccaggcccagcggctcgccggaatggatcagcgattcaatcacgcgacggtgctggttaaccttgatcgggtagacgaggaagtaatcgccgttatagccatacgattcacgcgcgcgtttgaaggcggcgttgatcgagcgcaggcggtgctgcaggatctgcgggaagcagaacagcgccggcaagcgctgcccttgcgcttcacgcgctttgactaattccgcgaggtcaacgcgcgcttccgggacgtccggatccgggcaaacgctgatgtggcccagttcgttgacgtcataatagttattgccccaccaggcaatattataagtacgcagcatcttgctggcttcctgggagctcatcgctacctcctgcatggaacgtagtacaccgtgttcgcctgctgacgaaggcgaaaccatagacatgtcgtcagacatagcgaacctcaatttttaataataagtgtaagacagttaactactatcgcagtccaaagatgcgataacaacccatgaacagtcctaaagcccagcactatctgctggttttgcgactgcgcgaccggtttcttattcatatcatcgtaaaacacgtagccgaacagagtatgacagtccggagaaaccacgagaaaactcttgccaggcaagagcgcccttgttcagttttctgacggccgaccggccctggaatcctgagaagcgccgagatggggtgaacatcggctggtttgcatgagagagatgcaggttgcggagtgctgacgcgcgacagaacgacgcgacgaatcaaacgaaaaacattggttcattatctggtatcacctccacaccgccctgcgacagggtcggcgacaagccaaagctatacataccgggcaacaggcgctacgccgctgcgagattctgtaaatacagactgcttaacccggctggaagtggcaccacagggccatgccccgtgcgcttttttaatgagccgcgcgcggcgttttataccgagaagcggggtaaaaagcaaaataaaaatgtgcctgtttgcgcggttgtcaggaaattttgccaggcgggttttcccataaatgcgaccgccatcaaaaaaggctggaaatgggctcaagatttgacctaaaatggccgtccagaagttaatccgtctatactgattaacactcagactgctcgtgtcgctacctgcgcggctttgcgctgattatccaccaaagccacattacacaacagtatgagctatccgaatcgtccacaggtgaaataaaatatggcaaaacacctttttacgtctgagtccgtatcagaagggcatcctgacaaaattgctgaccaaatctccgatgccgtgctggatgcgatcctcgagcaggatccgaaagcgcgtgtcgcatgtgaaacctatgtcaaaaccggcatggtgctggtaggcggcgaaatcaccaccagcgcatgggttgatatcgaagagatcacccgcaacaccgtccgcgaaattggctacgtgcattccgatatgggctttgacgccaactcgtgcgccgtactgagcgccattggtaaacagtctccggacattaaccagggcgttgaccgtgccgatccgctggaacagggcgccggcgaccaggggctgatgtttggctacgccactaacgaaaccgacgtgctgatgccggcgccggtgacttacgctcaccgtctggtgcagcgtcaggctgaagtgcgtaaaaacggcaccctgccgtggctgcgcccggatgcgaaaagccaggtgaccttccagtatgacgacggcaaaatcgtcggcatcgacgcggtcgttctgtcgactcagcacgcggaagatatcgatcagaaatccctgcaggaagcagtgatggaagagatcatcaagccgattctgccgaccgaatggctcaacgcgtccaccaaattcttcatcaacccgaccggccgtttcgttattggcggcccgatgggcgactgcggtctgaccggtcgtaagatcatcgttgatacctacggcggcatggctcgccacggcggcggcgcgttctccggtaaagatccatctaaagttgaccgttccgcagcctacgcggcgcgctatgtggcgaagaacatcgttgccgcaggcctggccgatcgttgcgaaattcaggtttcctacgctatcggcgttgcagaaccgacgtccatcatggtggaaacctttggcaccgagaaagtgccttctgaacagctgaccctgctggtgcgcgagttcttcgacctgcgtccatacggtctgattcagatgctggatctgctgcacccgatctacaaagaaaccgcagcctacggtcactttggtcgcgaacatttcccatgggaaaaaaccgacaaagcggcgctgctgcgggaagcggccggtctgaaataatctccgcgcttcctctcttcaaggccagcctcgcgctggcctttttatttacgcctcccccccccttttctgcgcccccatttcaacgcgcggccgccaaaaaatgaaagcgattacatagtaaagactgtcaccttctgcccaaagacgctatctcctgtacccatttttcacaatgttacatattgtttcggtcaactctgattaccgtttttcaaaatgtcgtctatccttgtttatattgctgatttaaaaagcatttaatgaattacgtttctttacctttgtggaaacgattacacagccgtgattatagtcacgtttttttaccgacgagtgtcctaccctaaccatcgacagaatcaataactcaactggagggcgttatgcctgacaacaaaaaacaagggcgttcgaacaagactatgacgttcttcgtctgtttcctcgccgcgctggctggcctgctgttcggccttgatatcggtgttattgcgggtgccttaccctttattgccaatgagttccagatttccgcccacacccaggagtgggtggtcagctccatgatgttcggggctgccgtcggcgcggtcggcagcggctggctctctttcaaactgggccggaaaaagagcctgatgatcggcgccatcctcttcgtcgccggttcgctgttctctgccgccgcgccaaacgtcgagatcctgctggtttcccgtgtgctgctcggcctggcggtgggcgtcgcctcatatacggctccgctgtatctgtcggaaatcgccccagaaaaaattcgcggcagtatgatttccatgtaccagctgatgatcaccatcgggatccttggcgcctatctctctgacaccgctttcagctacagcggcgcatggcgctggatgctcggggttatcatcattccggcggtattgctgctgatcggcgttatcttcctgccggacagcccgcgctggttcgccgccaaacgtcgctttgtcgatgcggaacgcgtgctgctgcgcctgcgcgataccagcgccgaagcgaaacgcgagctcgatgaaatccgtgaaagcctgaaggtaaaacagtccggctggtcgctgtttaaagacaacagcaacttccgccgcgcggtgttcctcggcatcctgctgcaggtgatgcaacagttcaccgggatgaacgtcatcatgtactacgcgccgaagatctttgagctggcgggttatgccaacaccactgagcaaatgtgggggacagtgatcgtcggtctgactaacgtgctggccacctttatcgccatcggtctggtcgaccgctggggccgtaaaccgacgctgatccttggctttatcgtgatggccgcgggaatgggcgtcctgggtaccatgatgcacatcggcattcactcctctaccgcccagtacatcgccgtcctgatgctgctgatgttcatcgtcggtttcgccatgagcgccggcccactgatttgggtactgtgctccgaaatccagccgctgaaaggccgcgacttcggtatcacctgctccacagcgaccaactggattgccaacatgattgtcggcgccaccttcctgaccatgctcaactcgctgggcagcgccaataccttctgggtgtacggcggtctgaacgtgctgtttatcctgctgacgctgtggctgatcccggaaaccaaaaacgtctcgctggaacatattgaacgtaacctgatgcagggtcgtccactacgcgagatcggcgcccgcgattaaccttcctgagcttcctcccatcccgggaggaagcttcctcttgctctcccccctcggccgcactatcctctggcgctatgaaaacgccccgtattcccatcgctattcagcaggccgtcatgcgcagcctgcgggagcatctcgccaatgcgaatcgcaagctggaacgccgctatgcggaaccgacgctggtctaccagcagcgtggtacttccgccggcaccgcctggctggagaaaaacgaaattcgtttaaacccggtgctgctgctggaaaatcagcgggagtttatcgatgaagtggtgccgcatgagctggcgcacctgctggtctggcagcatttcggccgcgtcgcgccgcacgggaaagagtggaaatggatgatggagagcgtccttggcgttcccgcgcgtcgcacccaccgctttgaactcgcttcggtccgccagaacaccttcccctatcgctgtcgctgtcagcagcaccagctcaccgtccgtcgccataaccgggtggttcgcggcgaggccacctaccgctgcgttcgctgcggcgatctgctggtggctgaaaaataaccatcggaattaattagaaactttctgatctgactgattgcatccggcaccctcattcgctacgttgcgggctcgttttgacacggagttaacgatgtcccgtatgcatgttttagccgtagcggtattgagcgcggcagtcagtggtccgcttgcggccgctggtattaatagtttttcccaggccaaagccgctggcgtcaaagtgaatgccgacgttccgggcgatttttattgcggctgtaaaatcgactggcaggggaaaaaaggcgttatcgatttggaatcctgcggctataaagtgcgtaaaaatgagaaccgcgccagccgggttgaatgggagcacgtagtgccggcatggcagttcggccatcagcgtcagtgctggcaggagggtggacgtaaaaactgcgccaaagatccggaataccgcaagatggaaagcgacatgcacaacctgcagccggcggtgggagaagtgaatggcgatcgcggcaactttatgtacagtcagtggaacggcggtgaaggccagtacggccagtgcaccatgaaggtcgattttaaagataaaatcgccgagccccctgcccgcgctcgcggcgccatcgcccgcacctacttctatatgcgcgaccgctatcagctgaatctttcccgccagcaaactcagctgtttaccgcctggaataaacagtacccggtcaccgcctgggaatgtgaacgcgatgagcgcatcgcgaaagtgcagggcaaccataatccgtatgtccagcaggcttgccaggcgcaaaagagctaacctacactagcggcaattgttaatttgcagccctgtgcttcccgcccgatggcgggaagctggcatctgcgcaacgaacggaatatcaagcatgcgcattcctcgcatccatcatccagaacgcctcattgtcggcagccagatcgcgctgagcgatgacgcggccaaccacgtcggccgcgtcctgcgcatgaccgccggtcagcacctacagctttttgacggcagtaaccaggtgtttgacgcggtcatcaccgaggccggtaagaaaaacgttacggctgaggtgctcagtggcgaacctgacgatcgggaatcgccgctgcatatccatttaggccaggtgatgtcccgcggcgaaaaaatggaattcaccatccagaaatcgatcgaactcggggtaagcctcataacgccactgttttccgagcgctgcggcgttaaactggatgccgaacgtttgcagaaaaagatccagcagtggcagaaaatcgctattgccgcctgcgaacagagcggtcgtaacgtggtaccggaaatacgtccggcgatgcagctggaggcgtggtgcgccgagcaggacagcgggctgaagctcaacctgcacccgcgcgccagcgccagcattaacacgctgccgctgccggttgaacgcgtccgtctgctgattggcccggaaggcgggctgtcggctgaagagatagcgatgaccgcgcaataccagtttactgatatcctgttgggaccgcgcgttctgcgtacagagactactgcgctcaccgccatcaccgccctacaggtgcgttttggcgacttaggttgaggcgttaacggagaagaaccatgatcaagctcggcatcgtgatggatcccatcgcaaccatcaacatcaagaaagacaccagcttcgctatgttgctggaggcgcagcgtcgcggctatgaactccattatatggagatgaacgacctctatttgatcaacggcgaagcccgcgcccggacgcgcacgctgagcgtcgaacagaactacgataaatggtatgacttcaccggcgagcaggatctgccgctggcggaccttgacgtcatcctgatgcgtaaggatccgccgtttgataccgaatttatttatgccacctacatcctggagcgggcggaagagaaaggcacgcttatcgtcaacaagccgcagagtctgcgcgactgtaacgagaagctgttcaccgcctggttctctgaactgactccggaaacgttggtcacccgcaataaagcccagctgaaagccttctgggaaaagcacggcgatatcatcatgaaaccgctcgacggcatgggcggcgcctctattttccgtgttaaagccggcgatccaaaccttggggtaattgccgagacgctgaccgaactgggcagccgctactgcatggcgcagaactatctgccggccattaaagatggcgacaagcgcgtgttggtagtggatggagagcccgtgccttactgcctggcgcgaattccgcagggtggcgagacccgcggcaatctggccgccggcggccgcggcgaagcccgcccgttgaccgaaagcgactgggaaatcgcccgccgcgtcggcccgacgctgaaggccaaaggccttatcttcgtcggcctggatatcatcggcgaccgtctgacggaaattaacgtcaccagccccacctgcgtacgcgaaatcgaagccgccttcccggatatttcgatcaccggtatgctgatggacgctatcgaaagacgtatcgataaataagcacgacggcggaccaacgtccgcttttggcgcagcgagcgcggattaccgcgctcgtgaaacgttgccagcctgacgccactcgggcgccagccagataaagtgcatcgacaccattctactttgcccgcatactgggtgttgcttttttgaaccaggaacgaacctctgacaatgaatttacagcatcactttctgattgccatgcccgcgcttcaggaccccattttccgccgctccgtagtctatatctgcgagtacaacgacgagggtgccatgggcattattatcaataagccgctggaaaatctgcaggtggaagggatccttgagaagctcaaaattgtcccggagccgcgcaatccagagatccgtctggataaaccggtgatgctgggaggcccgctggcggaagaccgcggcttcattttgcataccccgccctctgacttttcctcgagcattcgcatctcggataacacggtgattaccacctcgcgggatgttcttgaaaccttaggtaccgatcggcagccgggcaacgtgctggttgcgttgggctactcttcgtgggagaaagggcagctggagcaggagattttagataatgcctggctcaccgccccggcggatcagaatattcttttccgtacgccgatcgccgatcgctggcgcgaggcggctaaactgattggtatcgacattgtgacgatgccaggcgtcgcggggcatgcgtgatgagcggaacctttctcggctttgactttggcaccaaaagcatcggcgtggcggtgggacaacgcatcaccgcgaccgcacgaccattaccggcgctgaaggcgcaggatggtaaaccggactggaacgtcatcgaaaaattgcttaaagagtggcagcctgaggcggtaatcgtcggcctgccgctcaatatggacggcaccgagcaaccgctgacggcgcgcgcgcgtaatttcgccaataaaattcatggccgctttggcgtcgcgatccttctccacgatgaacgactgagtacggttgaggcccgcgcgggcctgtttgaacacggcggctaccgggcgctgaataaaggcagcgtcgattcggcctctgccgtagtcatactggaaagctacttcgagcagagcttttaagctctgccctcctgcgccgccggcggaccgctgacggcgcacgtttacccgcttagtggcgcagatgttcgttagcccagctcaccgcctgggtgcgatttttcacgctcagtttacgaaacacattgtacaggtgcgtccgcaccgtgttctcgctgataaacagcgcgcgggcgatatccaggttcgttgcgccgcagcgcagttcgttgaggatctcgcattcccgctcggtcagcggcgagttctctactggagtcgatgcatggtccgcagcgtacatcgccgggtgcatcacgctcaattcagccgtctgctcgccgttcagtacggccttaacgccctcaattaagcgcgattcatcatcgtcatgacggaacacgccatataaagccggccactgcgccatttcgtatagctcatacttttgtgcgctattaataatcaacaaacgaggattatctgcctgcaggcgaataatatcccgccacaccccgtttaatttcttatttgacactgcaatatcaaataatattacagaatcttttgccaaacgctgcgccagcggtttattaatattttgtaaaaccaccggtgccatcagggtttcgctcagatagctggcaaaggctttgctttgaatagacgggtgggtaataaaggttacctgacgagaagatgatgaatttccatttaaattaatcacttaaaactctccttagctgttacccaccgccatggtggttaaatgaataaaaaaagatacaaacagtcgtgaatttataaatcaccaaggtaatttacaaactgaaacgttattccatgagaatcatcctattcccacaaacagcataaatcgaatgactcaaagctgtcaaaagataatcaaacttttttcctggaaatgcgtattcactgtcgacatatctaatctgaatgtgttatttgaatttataatcaaaagttatttgtattaccaaataatattaataaacaacaaataaacattcatctaacatatcatttaacctgtcatatcaatctcttgctcatcttatagcgcgcctgcagcgacacgttgctgaaaactctgggtaaaggtcaacattccggcctgcatcccggtctgcatcacgccaggcaattgatgtacttttccttcacggatcaaattcgccaccgctggcgtgttgaccagaagctcgtatagcgcaactctcccgccctgacgtgcaggtaacaatttttgcgccagcaccgcgcacaggcttccggcaagctggctacgaacctgatctttctcctccgccggaaagacatcgatcaatctctccaccgccggcgccgcgccgcgggtatgtaatgtcgccattaccaggtgcccggtctccgccgcggttaacgccaggcgaatggtttcgctgtcgcgtagctccccgagcaggatcacatccggatcctggcgcagcgccacgcggagcgccgcggcgaacgaaggacagtgacggccaacttcccgctgctggatcagacagcgctcgctgtgatgaataaattccaccggatcttcaagcgtcagaatatggccatcaagatgctgattgaggtgccccaccattgccgccagggtggtcgacttgccgctgcccgtcgctccggtgaccaacagcaaaccactctcttccgccagcagttcgctcagcgcaggcggggcgccgagcatatccagacgcgggcactgttcaggaaggagacgcagcaccagcgatatcccacgcgtatgggcgaaggcgctggcgcgcagccgcgcaccgcaggccaggttcagcgcaaagtcaatctggccgtgttcctgccagtgcagtaactgtgcggcatcgagccagtcgttgagtaaattcgcaatatccggcgcgggaaagggcgcgggctccagcctgccctgccgccgccagcgcggtgcggcggaattgcacaggtgtagatcggagacattatgctttacactaagggctacgatttcttccagcttcataactcatcctcggaatatgaacgatattgcgcataacctggcacaggtccgggacaaaatctccggtgctgccgcccgatgcgggcgtgcgccagaagaagtgacattgcttgcagtgagtaaaacgaaacctgcgagcgcgatcgaagaagccattgcagcaggccagcgggcatttggtgaaaactacgtccaggagggcgtggagaagattaaccatttccagcaggctggcgtcagcgggctgcagtggcactttattggccccctgcagtccaacaaaagccggttggtggcagagcattttgactggtgccacaccgtcgatcggctgaaaatcgccacccgcctgaacgagcagcgcccggcgcatttaccgccgctgaaggtgctgattcaaattaacatcagcgatgagcagagcaaatccggcatcccgctggaagcgctcgacggcttagcggcggagatcgctgagttacctcatctggaactgcgcggcctgatggccatccccgcgcctgagtcagaatatgtaaggcagtttgccgtcgcccggcaaatggcggtagcatttgcgcgattaaaaacgcggtaccccacggtcgatacgttgtctctgggaatgtcggacgatatggaagccgcaatcgcggcgggaagcacgatggtgcgcatcggtacagccatttttggtgcgcgcgactacagcaaataataaggaatctgaggaacgccatgaagacgttgactttcctgctttcaacggtcattgagctttacacgatggtcgtgttgttacgcgtctggatgcagtgggcgcgctgcgacttttacaacccgttttcgcagtttgtggtgaaagccacgcagccgattgtcggaccgctgcgccggattatcccggcaatggggccgattgacagcgcctcgctgctggtggcatttattctatgcgtcatcaaagcgatcgtgctgtttatggtgatcaccttccagccgatcatctggatctccgctctgcttattctgctgaaaaccatcggctcgttgatcttctgggtactgctattgatggcgatcatgagctgggtcagccagggccgtagcccggtggagtatgtgctgatgcagctggcggacccgctgctgcgccctatccgcaacctgctgccgtcgatgggcggtatcgatttctcgccgatggtgctggtactgctgttgtacgtaatcaatatgggcatcgccgaagtgctgcaggccaccggtaatatactgctgccggggctgtggatggcgctatgagtgccgttgaaacctgcgctgacgggctggtgctgaggctgtacattcagcctaaggccagccgcgatagcatcgtgggcgtacatggcgacgagcttaaagtcgccattaccgccccgcccgttgatggccaggccaatgcccacctggtgaaatttctcgccaaacagttccgcgtcgccaaaagccaggtactgattgaaaaaggcgagctgggccgccataagcaagttaaaatcatcgccccacaacagatcccgactgcggtcgcggcgctaactgaataaacaggattcatcatgcaaaaagtcgtcctcgctaccggcaacgccggcaaagtgcgcgaactggcctcgctgctggaagattttggtctcgatatcgtcgctcagaccgagctgggcgtggactctgcggaagagaccggcctgaccttcattgaaaacgcgattctgaaagcgcgccacgcggcgcagatcaccggcctgccggccatcgctgacgattccggtctggccgtcgatgctcttggcggcgcgccgggtatttactccgcccgctattccggcgtcgatgccagcgaccagcagaatcttgagaagctgctcgacgcgttaaaggacgtgccggacgatcagcgtcaggcgcagttccactgtgtgctggtctatctgcgccatgccgaagatcccacgccgctggtgtgccacggcagctggcctggggtaatcacccgacaagccgccggtcatggcggcttcggttacgacccgatcttcttcgtcccgtcagaaggtaaaaccgcggccgaactgagccgtgaagaaaagagcgccatttcccatcgcgggcaggcgctgaaactgttactggaagcattacgtaatggctaatttgccgccgctgagtctctatatccatattccctggtgcgtgcagaaatgcccgtactgtgattttaattcgcatgcgctgaaaggcgaggtgccgcatgatgactacgtccagcatctgctgaacgatctgcaggctgatgcgcaatatgcccagggacgggaaataggcactatttttatcggcggcggtacgccgagcctgctgtccggcccggccatgcaaaccctgctcgatggcgtccgcgcctgcctgccgctggccgccggggcggaaatcaccatggaagccaacccgggtaccgtggaggccgatcgcttcgttgattatcagcgcgccggggtgaaccgcatctccatcggcgtacaaagctttagcgaaccgaagctgcagcgcctggggcggatccacggcccggaggaggccaagcgcgcagcacgtctcgccagcggcctcggcttgcgcagcttcaacctcgacctgatgcacggtctgccgaaccagtcgctggaggaggcgctggacgatctgcgtcaggcgattgccctcaacccgccgcatctgtcgtggtaccagctgaccattgagccgaacaccttgttcggctcccggccgccggtgctgccggatgacgacgcgctatgggatattttcgagcaggggcatcagctgctgagcgccgccggctatcagcagtacgagacgtccgcctatgctaagccaggcttccagtgtcagcataatctcaactactggcgctttggcgactacctcggcatcggctgcggcgcgcacggcaagatcaccttccctgacggacgcattctgcggaccgccaaaacccgccacccgcgcgggtatatggaaggccgttaccttgagcgtcagcatgatgtggaagaagcggataaaccgtttgagttctttatgaaccgttttcgcctgctggaggccgcgccgcgcgctgaatttagccgctataccggacttgaggaagcggcgatccgcccgcagctggacgcggcgatagcccagggctacctgcaggaagacgagcagaactggcagattaccgagcacggtaagctgttcctgaattccctgcttgagttgtttctgaacgagtaaacgcagcggcggtcctgccgggaagcggaccgccatggcattatttcagcgagccaaccagcgctttgcggctgtcctccagcgataccacccggctgcagacgtccttaccaaactgctggaaatcggcctcctggtttttccattcctcctgaatcgccgtttgcaggccgccgaggctgccgagaatgccctgtagcggattaccgccgcctttgagcaccgctttcgcccccatctcgttaatgctgtcctgcagaatgccgcccatcgcctgattcaccagctgctggccatcggcgcgtacctggtcgatagctttatagtggaaagtcaggccatcgctgcgacgttcgataatgcggttcatctgttctttcagctgcgcatccagtttggtcaggcgaccgtgcatgctgctgttggcgccaacctgttcggtaatgattttatccagcgccttgcggcttttttcgactcgcgaacgcgcgccttcgtcaatccacggcaggctgctgcgcaggctggcctgataatcctgcgcctgttcgcgctgggcggcgctgagcgcataggccttgccgttaaaggtcagattgccgtccggctttatcaccagatcgccgttttcccctttcacctgcacctgctgcgggctgaggatcacatcgtcacgcggcgtgacgctacactggtagtccgcatgggcagacaaagcggtgacggagagcgccaccgccagcagcgttttacgcatcataaaactcccttaagacaaaacgggccggcaattgccgacccttgtcaaacttagtcccaccagacgtcaaaaagttcgctggtgcgcacatcctctaacttacgcgcttccagccatttgcgtacgatagcctgatgctcttcagtgcacttaccaatctcctgcatgcagatgagcccttcccaggagagataaccgctgccgtcgaaggccagcttgttcggctctatcacctcttcgatcagatcgttgaccgtctggtcgatctgctcttcgctggtcccttccgggaaacgccaggcgacggagaagcctaactcctgaaactcatcgatatgcatttttttacgcagacgacggctacgattcttggccattatttcaccctctcgaacattaagtcccatacgccgtggccgagacgatggccacgctgttcaaatttggttaccgggcgcgattccgggcgcggtacgtaatcgttgcttgccgactggttacgatagccttccagcgaggacataacttccagcatatgcacggcataggcttcccagtcggtcgccatatggaagacgccgccgagcttcaacttgcttttcaccagctcagcgaaaggcggctgcacgatacgacgtttattatgacgcgctttatgccacggatcagggaaaaacagttgcaccatattcagcgagttatccgggatcatggtatgcagcacttccaccgcatcgtgacacattacgcgcaggttttgtacgccttcttcttccgcagaagccagacaagcgccaacgcccggggagtgtacttcaatgccgaggaaattctgttccggtttggctttcgccatcgccaccagcgaggcgcccatcccgaagccaatttctaaggtgaccggcgcgtcacggccaaacagggcggcgaaatcgagcggcgcatcgttgaattcaacgcccatcaccggccaaatgttatccagcgcatgctgctgccctttcgtcaggcggccctggcgacggacgaagctacgaatacggcgcagcgggcgaccgttttcatcgaattccggagagatgacgtcgtttttcataaaagtttggtctgcttgtgaatgtgttcggaaaacgggcattatccaaagttactcggcggatgcaagggtttacagccactcgcccttatgctgcaatctgcccccctgtaatcgcgatcccggagccgtagctttgacttttctcgccacgcaattttcagcccaggttctggactggtacgacaaatacgggcgtaaaaccctgccctggcaaatcgccaagacgccctacaaagtatggctctccgaagtgatgttgcaacaaacccaggtgaccacggtaatcccctattttgaacgctttatggcgcgtttccccacggtggtggatctcgccaacgcgccgctggatgaagtgctgcatctgtggaccggtctgggctactacgcgcgggcgcgcaacttacataaagccgcgcagcaagtcgccacactgcacggcggggaattcccccggacctttgacgaagtggcggcgctgcccggcgtcgggcgctcaacggcgggggcgattttatccctttcgctcggtcagcattatccgattctcgacggcaacgtgaagcgcgtgctcgcccgctgctatgctgtcagcggctggccggggaaaaaagaggtggaaaaacggctgtgggacatcagcgaagaggtcaccccggcagagggcgtcgagcgcttcaaccaggcgatgatggatctcggggcaatggtttgtacccgctcgaagccgaagtgcgagctatgtccgctgagcaacggctgcgtggcctacgcgaaccattcatgggcggaatatccgggcaaaaaaccgaagcagaccctcccggaacgcaccggctacttcctgctgatgcagcacggcgacgaggtgtttctttcccagcgtccgccggtgggtctgtggggcgggttgttctgttttccgcagtttgcagacgaagcggagctacgcgagtggctggcgcagcgccagataaaggccgataatctgacgcaattaaccgcttttcgccacactttcagccatttccacctggatattgtgccgatgtggcttacagtgcactcatctggcgcatgcatggatgaaggcaacgcactctggtataacttagcgcagccgccgtcggtcggtctggcggcccccgtggagcgcttgttgcaacagctaaaagccggagcgccggtataaatttttcggctatcaaagaggattaattatgagcagaaccattttttgtaccttcctgcagcgtgaagcggacggccaggatttccagctgtatccgggcgagctcggaaagcgtatttacaacgaaatctccaaagaagcctgggcgcagtggcagcacaagcagaccatgctgatcaacgagaaaaagctcagcatgatgaacccggagcaccgcaaactgcttgagcaggagatggtgcagttcctgtttgaagggaaagacgtgcacatcgaaggctacacgccgccggaaaaacagtaagggccctgcggcctttaaaaaaacaaacacaacacgcacgcccggaatgatgaaaaaatacttagcgctcgcgctgattgcgccgttgctcgtttcgtgttccagctccaataaaaaaggcgccgaatacaacgaggcctgggtcaaggacacgaacggattcgatattttgatgggccagttcgcccacaacatcgagaacatttgggggtacaacgaagtcctgctcgccgggccaaaggactacgtcaagtacaccgaccagtatcaaacccgcagccacatcaacttcgatgaagggacgatcaccgtcgagaccattgccggcaccgaccctcgcggacgactgcgccaggctatcgtcaaaaccctgttgatgggcgatgaccccaactccattgacctctattccgatgtcgatgacatccagatctccaaagagccgttcctctatggccaggtggtggataacaccggggcgtcgattcgctgggagtggcgcgccgcgcgctttgccgactatctgctgcaaacccgtctgaagagccgcaacaacggcctgcgcgtggtctacagcatcaccattaacctggtgccgaaccacctcgacaaacgtgcgcataaatacctcggcatggtgcgtcaggcctcgcgtaagtatggggttgatgagtcgctgatcctcgcgattatgcagaccgaatcctcctttaacccctatgcggtcagccatgccgacgccatggggctgatgcaggtggtccagcacagcgccggcagagacgtcttccgctcccagggtaaatccggcctgccaagccgcagctatctgtttgacccggcgaataacatcgacaccggtaccgcctacctggcgatgctgaacaatgtttacctcgccggcatcgataaccccacctcgcgtcgctacgcggtgatcactgcctataacggcggcgccggcagcgtactgcgggtcttctccagcgataaagtgcaggcggccaatattatcaacagcatggcgccaggggacgtctaccagacgctgaccacccgccatccgtcggcggaatcgcgccgctatctgtacaaagttaatacggcgcagaaaagctaccgccgtaaatagccctcctcccgactccggcctcagccccgcgctgaggccgcgcttattctccgccatactctgtaatatctttcggttttctgcggcagttaacagaagcattaagctagtgaatgatagaatcgcatcaaaataacgggattaatgttattttaaaaacataacaagcccacattcgtgaggataactacatgaatcttaagctgcagctcaaaatactgtcgttcctgcagttctgcctttgggggagctggctcaccacgcttggctcgtacatgtttgtcacgctgaagtttgacggcgcggcaatcggcgcagtgtatagctcgctcggtatcgccgcggtgttgatgccgacgctgctcggcatcgtcgccgataagtggatcagcgccaaatgggtatacgccatctgccacctggtcggcgcgttaacgctgtacctcgcggcgcaggtcaccacgccgggcgagatgttcctcgtgatcctgcttaactcgctggcctatatgccgacgcttggcttgatcaataccatctcctactaccgcctgcagtcggcggggctggatattgtcaccgatttcccgccaattcgtatctggggcaccatcggctttatcctcgccatgtggggcgtgagcttctccggctttgaactgagccatatgcagctgtacattggcgcgacgctgtcggtcctgctgactctgttcaccctgacgctgccgcatattccggtcgccaacgcccagcgcaatcaaagctggacggagatgctcggcctgaacgcttttgcgctgtttaaaaacaagcgtatggctatcttctttatcttctcgatgatgctcggcgccgagctgcaaatcactaacatgttcggtaacaccttcctgcacagcttcgataaagatccgctgtttgccggcagctttatcgtcgagcacgcgtcagtgctgatgtcgatttcgcagatttccgaaacgctgtttatcctgaccatcccattcttccttagccgctacggcattaagaacgtgatgcttatcagtattgtggcgtggatgctgcgctttggcctgttcgcctttggcgacccgacgccgttcggcactgtactgctggtgctgtcgatgatcgtctacggctgcgccttcgacttctttaacatctccggttcggtgttcgttgagaaagaggtgcgcccggaaatccgcgccagcgctcaggggatgttcctgatgatgaccaacggcttcggctgtattctcggcgggatggtgagcggcaaagtcgtcgaacactttaccgtcgaggggatcactgactggcagagcgtgtggctgattttcgccggctattcgctggtgctggcctttgccttcgtggcgctgttcaaatacaaacacgtcagacaaccgaccgccgcccagcagagcgtgtgatcggcaaaagtaaaacgccccgcctgttcggcggggcgtttttttatcccttcagcacgtagccatacagccgcttaatgccgtccggatccgtctcgctgtaaaccccctgcagctccggcgagaagccaggcagcatattgaccccctcctccagcgcgaggaaatagcgcagcacggcgccgccccagacctcgccgggcaccacgcacagcacgcccggcggatacggcagcgccccctccgccgcgacgcggccttccgcctcgctcagacgcaccagctcaacgttgccgcgaataaactcgtggttggcatcctggggattcatcaccacccttgggaagctccgtttacggaacatctctttttgcaggctcttcacgtcaaagctaacgtacagatcgtgcatctcctggcacagctcgcgcagggtatagtcgcgataacgcaccggatatttgttatagatggtcggcaacacatcggccagcggcgtatccgcttcaatatgctgttcaaactgcccgagcatcgctaccagctgcgccattttttcggcactttccgccggcgtcagcaggaacagaatcgagttgagatcgcacttctccggcacgatgccgttttcacgcagataatgcgccagaatagtcgccggaatgccgaactcactgtactccccactctccgcgtcgatgcccggggtggtcagcagcagcttgcacgggtcgacaaaatactggtcgtccgcgtagccttcaaaaccatgccagcgcgcgtcgggttcgaagctgaagaagcggcgctcccgggcgatcgcctcggtcgggtgatcctgccacgggcgccccgccaccgtcggcggaataaagggctggatcatcttgcagttagcgatgatcgctttgcgcgcctcgatgcccagcgccacacactcggcccacaggcggcggccgctctcaccttcatgaattttggcgttgacgtccagcgcggcaaacagcggatagaacgggctggtggaggcatgcagcataaaggcgttattcagccgcttgtgcggacagaaacgcgcctggccgcgcagatggttatcctttttatggatctgcgacgtctgtgagaagccggcctgctgcttgtgcacggactgggtgacaaaaatacccggatcgtcgggggtcagctccagcagcagcggcgagcagtcggccatcattgggataaactgctcatagcccacccacgccgagtcgaacaggatgtaatcgcagaggtggccgatcttatccaccacctggcgggcgttatagaccgtgccgtcgtaggtccccagctggatcaccgccagacgaaacgggcgggaggcattggctttctcaggcgccgcttcgcggatgagatcccgcaggtaatgctcatcaaagcagcgctcgtcaatgccgccgataaagccgaacggattgcgcgcggcttccaggtaaacaggcgtcgcccccgcctggatcagcgccccgtgatggtttgacttgtggttgttgcgatcgaacagcaccagatcgccgcgggtcaacagcgcgttggtcacgactttgttggccgccgaggtgccgttgaggacgaagtaggttttatccgcgttgaacaccttcgcagcgaacttctgcgcgtgcttggccgatccttcgtggatcagcagatcgcctaatttcacatcggcgttgcacatgtcggcgcgaaagacattttcgccaaaaaagtcatagaactgacggcctgcagggtgctttttgaaaaacgccccgtgctgatgccccggacaggcaaaggtgctgttatccatctcgacgtactgggtcagggtattgaaaaacggcggcagtagacgcgcttcataatcacaggccgccgcctccagctccagccactcctgatctttaccggcgatcaccgcctgcaccccctccggcttgtcgaccgccgtctcactcagcaggtagaccggcaggttaaatccgctacgcctgaggagagtaaggatgccgctgcgactgtcggccacggagatgacgactgccgccacatcggtaaaatcggtactgtccagcgccacaacgcgacggtgggtggacaagcgggtgaccagctcgcagctggcggcaatgtgcatggatttcataagcgcaaatgcccgtatcgggagtgtaaaaatctcagacaagggagaccttgcccaacgatgtgtccgggtctgacggattcagctccgaccgccggacatcagtaaaagcagacgcgtccgatcttactgttgccctacagtgagcatacgtgtccttcaccgcatggtgaacagaggggtaagcgtagcaagatgaggcagcccgcgcatctgggcgcggcgtcgctggcgagataatggctgtgtcgtcatcggcggcctcatatcagggaggagaaaattcgcgcaatcatggcacctttcccgaacaggcgcaagatgaaaaccgtatgcacttatatcacggatacacaagctttcccggtaagttaacgccataataatgcggttatcagggatttttaacaggagtcagcgtggttacaggaccttttattaacgccagcgcggtgctggtcggcggtgtgctgggcgccttactcagccaacggttgccggaacggatccgcaccgcaatgacctctatttttggcctggcgtcattgggcatcggcattttactggtcattaagtgcgccaatctgccggtgatggtgctgtcgaccctggtagggacgctgctcggcgaaatatgcaatatggaaaaaggcatcaatacgctggtcagtaaactccagcagttgatgtcagcgaaaggcaagaaaaaggcttcggctcatgagtcttatattcagagctatgtggcgattatcgtcctgttctgcgccagcggcaccggcgtcttcggcgccatgcgcgaagggatgaccggcgacgccagcattctgattgccaaagcgtttctcgactttttcaccgccaccatcttcgcctgcaccctgggcattgccgtcgccgccatcagcgtaccgatgctgcttatccagctgactcttgcagcctgcgcggcgatcattatgccgcttaccacgccgatgatgctggcggatttcagcgccgtcggcggcatgctgctggtggccaccgggctgcgcatctgcgggataaaaatgtttgccgtagtgaatatgctgcctgcgctggtgctggcgatgccgatttccgcggcctggacgctgttttttgcctgaaaacgcgtgcttttagcgcaatgtggtgatagattgttcagtctgctgcaaaacagataaatttcgttgacgaggcgcggcgattacggtttaatgcgccccgttgcccggatagctcagtcggtagagcaggggattgaaaatccccgtgtccttggttcgattccgagtccgggcaccactatttaaagaacccgcccaaaaggcgggtttttgcttttctgtagccggactctccatcgaactgcgttcgattattcgccgcacagcggctcaccccttcggggccagcgcggcacgcgcgctgttcaacgcctgcggcgttagtccgagtccgggcaccactatttaaagaacccgcccacaaggcgggtttttgcttttctacgaccggactctccatcgaactgcgttcgattattcgccgcacagcggctcaccccttcggggccagcgcggcacgcgcgctgttcaacgcctgcggcgttagtccgagtccgggcaccactatttaaagaacccgcccaaaaggcgggtttttgcttttctacgaccggactctccatcgaactgcgttcgattattcgccgcacagcggctcaccccttcggggccagcgcgacacgcgcgctgttcaacgcctgcggcgttagtccgagtccgggcactcaaataccgataccaccatccggaataccaagtctggcaatacgccttacaagcccagcgacgcgcagtgtctggacctgctgattaaacccaacggctctaagctctggcagctcaagtaccgctttggcgggaaggagaagaagctggcgtttggcgcttacccaaccgttacgctggcgaatgcgcgtaagctgcgtgaggaagcccgcgccgtactcagcgcgggtgacgatccgggggtaaaaaagcagcaggagaagcaggcaaagaaaagcggcaacacctttgaagaaatcgcccgtaaatgggtggcaggcaatatccgctggacggaggcacacgccgctaaagccctgcgctcgctggagctgcacgtatttccactgattggcaaaatccccgttgccgacctgaaaaccgccgatctgctgatcccgctgcgggtggcggagagaaagggcaatctggagaccgccgcgcggctccaacagcgcatcacggcgatcatgcgctacgcggtacaggagagcctgatcgccagcaatccggcaaacgatcttaccggagccatcgcaccgccgccgaaaaaccactaccccgctctgccgctggagaaaatgccggaattactggagtgcttcgagagctattccggcaggctgttaacccgtctggcggtgcagcttaacctgctgatctttattcactccagcgaactgcgctttgcccgctggacggagatcgatctggatggcgcaatgtggaccatccccgccgagcgtgagccgattccgggtgtgcgctattcagagcgtggcgcaaaggtgaaaacgccgcatctggtgccgctgtcaaaacaggcggtcacggtgctgaaacagttaaagctgctgtccggtaacagcgagttgctgtttcccggcgatcacgatccgcgcaagccaatgagcgaaaacaccatcaacaaggcgctgcgggtgatgggctacgatacgaaagtggacgtatgcggtcacggcttccgcacgatggcctgtagcgcgctgatcgagtccgggcgctggtcgaaagatgccgtggagcggcagatgagccatcaggaacgtaacaacgtgcgcgccgcctatatccacaaggcggagcatctcgatgagcgcacgcagatgatgtagtggtggtcggactatctcgacgcctgtcggcagaattttgttgcgccatatcggtatgacaggcaggttcaggtggcctgagccattcagtggatcacgtaggaaagcagatctcagcggatctgcttttttatttgtaccagcttcgtaatccatttctcggcgccagatctccccggataaacaccaatctgcgccagtgccagccctttcagccctttggtctgttctggcctggcgctgttaccgttagcgctcctttaccccttcggccttttgcttttcatgattgcaccagaacaggaaattattcctcttcccgtcgcccgtaaacccgcaccacataccgcccgcgcccgtcgccgtggcccaaatccattgaggtcagcaccagcgcttccctgtgactgaatccctgcgccagatatcggcggagcgcatcctgcgtccatgcataacggaatgactgcaggatataaataccccgtcagcccggtcttcgcgatttctttgcgccagtaatccatcgcttgctggagactgggcttgtcaatcagtctgccgtcacgttgttctgcgacagccagggcattttccagcacttttttcactgcgccagcgtcctgaatggtttcacggggacgatggcctttggtaccaaataccaccgtgaaccggatttcgccgcgctccagcgccaatttccacgttttcagtgactgacagcactgaaccgcttcctacgagttcaatgttgtcaaggccacgagacggtgagcaccgcactagcatgccctatgccgagggcacccgttccgttactgcacaaggaccaggtaaggatggtacccgtgctccctacccctacggttcccaggtcagacggggttcctacgaagtcgaagttgttgacgtcgggtgtgcactgcccggcagggcggtttcctattagaccaaagatattagccatcttgacagtattcgaggcatcctggagagcgagagaatttgaaacgtctccgacggtgccttgcgcggatagggtaactgacacgcgattggtcccactgccaccatcatcgacagaggtgcacgaggtcgtgatagtgctttgctgcacccgcaagagttgcccggatacgacggacgcgtcaatctggccaaattggactgtaggtgtgtctatgttgacggtgcaagaagtgggcaacaccacacgtacagcagacggcaagggaatggagactgtgggaggactcccccacgtattcgcactgaattttgcaaacacaagcggtaccacgttgtacgtcccggcaacggcgttcggacctgcatgaatgaagacgctaccagtgaacgaggatggatacgacattgttacggacgtctgggtcccagacgtggtggtggttggggccgcccaaggacacctggatagcggataggtttgggacgcggtgacaccgttatcagcaagcgtcgcagagccattcacacgtcccgaggtgtactgggtcgagccagtcatcgtgcccgagatccctaacacgaggtccggaccaagtggtatgccgtagaacccgtcgctggtcgtggtcatggcctggtgaaacggtacgcgcatgcaggatccatcgggcggcattacgtcggctcgaacgacgctagccggtgccccgagattatttgtatccaaattggaaccagttgcggtggtcccggggatagtgatgttcaccggaacgcgccaggtagcatccgccccgcctgggcgtatgacctcaatgagggcgtaagagggggcggaggacaggagtcctaccatagccccccaaattttccaccgtgcacggtaatccgacacacgcctggcttgtttcgttttagaccagtgacgtgtctgctcataaagccgacggaccttctcccggtggttggtcagtgcgcgaggggcaatgccgaccacaaccttatccgtgagccacgcgcccagccagtcaaaacctcggctcactttgccaataaacgtcttgtccgggtgtttctcaaaccctaatgacgcaagatatttattgagttgcttcacctgcttacgtaactgccagcggctgtaagttaaaataacaaaatcgtccatataacgtccataatagattttatgttgatgagcaaaataattatccacagcccagagatgcaacgcccccatgagcggacttaacgcgcaaccacgcgcgatacccttttcgggcgtgtaaaactcgccgccctcttccacgctgtagtgaatatactgagttaaaatagtcagatacgccgggcgcgtaatatgctctctcagctgcaacagcaaagtctctttattgatagccccgtaataccccttaatgtcggtgcggcaaacccagcggtaaccgttttcggtcaggctctgcgagatccgacgtacggacgatctaccaccgccatgccccttcacatgctcacacttctcatgtaccgggatggatggggtgatggacagcgccacccacttaagggccagcgcatcctccgcgggccacatcacctgacggcgtgtccccaccaccaacatgggggacaggtggtgctctcccgactgcagttttctgagaaacgcttcccggcaggcaggccagcgctgtcgcaaatgccagatatccgcattcgctggcgccgttttgcgcgactcacacagccaggcccaggcctcgtctaaacgttgcgcatcacgcaggtcgtcgttatgccacttcgtgcgttcatcgtgctccgcactcagctcattacactgtgtgggattcatgttcatcatttcccgccctgacaggtataggtcacctgacggaccggtttatccggcgacgtcgataaaccggagatgtcaaaactgacacggcactgacgtgctgctgtctcgccccacttaaccagtaactccccccgctccggcaatccggtcagataaacctgtccgtcatcacccacgatgctgctattcacctctgccatccccgcattcagtaacgtgacaactgctccaaacggcaccacgccattgtcgagtttaagcgtcatcagcacctgataacccacccgggtcgcaaagtttgctttgacgacagcgcctttggtcgggtatacattgaggttggtctgtgtgaggtcgacattttccggtaaggtgctggggtcaacacccacgctgttgcgggtgtaatccgtcaggtaaggcactaccgcatatccgcgccagtcggtgaccgccgtaccaccgttgacactcacgccagccgcccccggggcactcaccagcgccaccgaatcgcccatggcacgtgacagcgttatcccgccactatgcaccatcaccccgccactggcgctcatgttgatagcctgcatatcgctgctgtagctgtatccgccgctgatacttcccttgcttccctggtaaccggtatttaagttggtgttactgatctgtccctggttaccccagctttgcgaagcactgtaggacagtttcccgtccatagtgttaccactgagcccggtctgactcagggtccgcccggtgttatcatgagtgagcgtcgtggtggcatacattgattgcaggttacgtgaatagccaaagatgctgaacggcacactgacgttaaacgaaatctggcgattttccggccagttaccgttcgcatcctttgtccgatcaatgttgtagttgacaccgtaactgacgcctttcaggctgttgctgtaacccagcgacatgccggtcagcgtacgttcgcctccccagtagtcatcccggctggcccggaaatacatggttccccagtccccgagttgctggctgagctgcgtctggaagctgttacggcggcgctgcagggaccacgggctgactccctcctgcaactggtgtccctgactgttgaattcactgaaactgtaataatcctcggttgaataccgcagcgcggttaaatcaacagaggtgcccgtggacagcagacttttggaataacggacgcgataagactggcctatcagggtggattcgttatcaaacttcgccgatgaattcgtgatatcagccgagagcgcaccgacgtatcccagggataccccggtaccgatgttgaacgcctggtagtcttttgcggcgagaataccgccgaacagcgtgacatcaccgggcagtccgtataccacggtccccagcataaaatcagcccggcgggaaccatctgtcagattgccgtcatactgtcccgccgtcagctcatacttccagccaccgggacgcaacatgaccggcagggaagagtagggcacgatgaactggcgctcggtgccgtccgcttccgtgactttgacatcatagtcccctgacaggccggcctgctggatatcattgatgtaaaacggccctggcgccacataggtctcgtacactacattgccgttttgacgcacagtcactcgggcattactgttcgccacgccgctgatggccggcgcatagccacgaagctggctcgggagcatctgttcattagagctgagcttcaccccacggaaagggataccgtcaaaaacgtcactaccggtgctactctcacccatgagtaagttcgagcgccagccccgaatatcgcgggcaaggtaggtattcgaaaagcgtgtctgggtggtcgtcagggcattattaccgccgttattttccacccgggtatgggtcatggtgctgcgcaggcgccacggccccgtgtttgccccggcgcgcacggttgcaaagaggttgttattatgtgaggtctggttctggccggaattcgtggtacgaccggcgctgaggctatagttcgccatcagggcggaaatcccctcctcccattgcgacgggtcaaccgcaccacgtacttcaggctgcattgcggcctgaggtacgctgatatccagacgcaggcgcgccagatccagcatggtggtcgcctgagggataagcgcgccaatattgtctatctcagccgtagcaggcaaatctttcaggtccggcagttgcctgacattcactccaaacgtttccagttcagatggcgtgagaaccggcgcaattttgccctgcgtatttttctgaaaatccagggtgtactgccctgcattgcgctggttaacaaatacccataccgtatatttccccggctgaactcccccggcctcagaaaatgcggaaaggtcgacagccgtattatcgccggaattaccaagaaatcccggatcaaaataatcaccggcccaggctgggttaatacaaaccaataaaaaacctgccaccggggagtaacggaaaagcttcccggaagaaggcttcccgaaattagaaataagatgcatgtcgcttttttccattcaccagaaaagattgtatttattaaaatacttacccagacagtacgctgacctgctctggagtattccgtccttcaccgtcaataagactccaggtcacctgcccccgcgcaccggatgataatgggtacctctgctccccaaatggcggtatcatttttgaaagcgcgtttttttcgaccggatatttcccgacagacagtgaacgaaaagtgagataatatggtgtcgggtttatcactttcagttccccactctgcgatataaaccgtatttcccgcgcaaattcggacacatcatactcaggcatcccctccgggcgataaaacagcttcagattattttgcatagccagcgtcaatgacgctgaatccgtgtttttctcctgaccaggtatggttttcaggctcagaataaataccgactcacgatccttaggcagtgtattacgcgttaaacggatacggagcgtcagcgcatctgatgcttccagccgctgtaagggaggcaatacaataaatggcacccctccactctgattaccggatacgttatcctgttcatcagcctgccatggaataacccgcgactgtaaaaggaaaggctttgcggtattattggtaactgtaaatgtaataccattgtggctctcacccggatatatcacgcgtgtggattgtaatttaataccgtcagggttattaccagttgtcccatatgatggcgagctgatgataaacatggaaaaaagcaatatcattagtcgatattgacgcaaacaaaaaatacgcagcatgaggtttattatattccttttacggccgattgatgttcgatactttcaccaccgaaatcattaatggttgtccaggaaacggtccgcacagtcccgttgacggggtaatactgtgtggagaatggcgcaagcattgcccccgcctctgtccctttcacatccatgctcttaccgtctacattcagtcgggacagggtcacgtaatacggcgtgggattgctaatacccagtccatgttccgtattgctgaaagtcagctttttggccgcttcactcgccggcattgacagcccggaaggccggtaaaacagtttaatcaccgactgtataccgactgaaatacgggctgacacaccagactgtgtcccttcggcggcatctgatgtcgaaggaatagccaaaaaactcagataaaaaaccgattcacgatccacaggtaattgtgctgcgccattacggactatcagtaccgaattttgactgtttggctccagcctgaataagggaggcgtcaccataaagggtacagcagacttcgggtccgtctgagtgtttctaccgtcaggtgtcgcaaacacatcggcttttatcaaataaacctggccgctgttattctttatcgtcgcctgtgtatcttttgctctggcatcaaatataacgcgtgtctgactgagctgcagtcccccctcagcggcactcgctacattacagaccagcattaagcctataaacccggcaaaccacagtataaatctgcccgcagcttgtgcgaatacattcatttttatcgctaattcattcataaataaactgaagcgtcacggtggcgttcatattaccgcccttcaacgaaggtccggcagtacagttaccacaggataaacgcgcttcaaaattcagtgtctgaccattaagggtattaagctgctggtccgcagtaccgacaattagcttatccatattagcgattgcggccatctggccttgctgaaccagttttactccatacccctgagaataatcactggccgcattatcattgcggaacagcggaattccggacgtgaaggtattccctttaatctggactttgggtgttaatccccagccactacagtcagaaaacgtcatcgaaaataactgcgggtcgataccatccccccctgccgcaattaccgtggaagaggacacaggcgaaaatgtaatactgggccgatccactgaaatctgacaggagcctccaaccagcgtggctgaaaaattaaccgtcgttgaggaagagcctgcatatactgatgtggtcagtgcaaacaacatgcctgacaacataaagccgaccagttttgtggaacgggtccgttcattgtaatgcatcctttatactctccagattcagtcaaacgataccgtaaacgttaatgtcgatttgacggcgccaggggtcacactttcacttccggccctcaccaggcccagcaggaagggttcgttatggggcgtgcctgcattcccgacgggcgacagagcaaaactgacgttattactgaccgcctgtgaggggttataaaacgatcccaaatctatatctccagtgtcctggcgtaccatgaaccctacacctgtggccaccgagcccggatcgcggaaaatggtactgtctgaatacggtgtgctgcccgacaccgacatctttggcgttgtcgccccgctgcatatcacggtcgccgtcagaggtaacatcgccacggtagcgccggactgaaaatcaacggctttgtggataccaaactggagtgatgactgcgataactggacatcacaggtaccatcgctgatttgcgcggtaaaattcacctccgccgtgtcagcggcctgaatgcccgatgataccaacacgcaggcgagcgccacgccggataacggcttagcggaccgaaccatgaaacacctccgtaccgccataatcattgatagccttccattcaacccgcccctgatgcggcgcacgcgcatataactgagccccaaaaggcgctatcatggtgttgcctgctaccgcactgagaggaaccctgactccggccaccttaagatcggcgagcgtaatgtaatacggagttgggttggtcacccgaaggccctgcccggtggatgaaaactgcagcatacccatagcctgctgctgcggtaacgccagccctcccgggcggtaaaacagcttaactaccgttgccgtggaaacctgaagtgacccccctaccacggatgacggggaagcgctctgcttttcccccgccggcatggcaacgctgcgaaaatagaagagggattctctgtccgtcgccagcccatccgcacccggttttttcaccaccagaacctgattcgtactgcccggctcaaggcgaaataatgacggcgtcgtaatgaacggagtctgtacgttgttaccttcaatatcccgtgagacctgtgccctgaccagataaggtgcgaccgatgagactgaacttgttacgccgacgctgcgccctctggcatcatcactgctctgaaatataatgcgcgagctgtcgatggaaattcccgcgaaggcggaagccattcctgcaaatatcaggagtaaaacaaaagtgacatgctggaaagttttcatcgttaattaataaagggaacgcgttgccacgtcccctattcaccttatggttaattgacaatataagccacagtcaccggtacgctataactacccgctgccggcgtagcgtcagtggtacccatacctacattgaaagaataactattcgtgtcagcagaggtcacatccaaagccacattctgtgactcagccacctgcacatcgttagcatccttaatcataaagccaacggtatcacccgtcgcggcggtaaacagctgcttgctcgggtcggagcttgcgctctgcccctgaataatcagcgcgccagtctcatcagcgcagttggttaattcaaccggcagcgcaacagagccctgctgagtgttaggggtaaaagaacttgctttgtagacccccacattcagggtcgccaggccattgttaacggaaacatcacaggtagagttggtgataataccttccagcgtcacatcagcagacggtgctgcattagccatcatgctgacaccagaaaggcttgcaaaaactgcagcagcgataacacttttcttaatagacatttttcactctcacttatttataaaagacacgtacagaacatttcgccgaaatataatactgcccctccccctgggcaaacaatgagacaggcagagtccttgtgagcgattaagattacatatgtaatccactccactctcctgtaaccggaatgaaaacactgtatacaccggactgacacgcaaaatgaataacggatgatgatgacccggtcttcaaacagactggtatcacgcagatataacgatgagcgctaataaaagcgatattttgaccagcattcaatttacctgccagaccaggcgttgttgaaaccagcatattaacagagagtataatatatccgaatactattatccggcgcatttagaatgcgcctgtatttcaggttcttcgctctggattattcacatggaaaagaagacaagggatggcgactatcgacagacaacaatgcagagtcaatcgtcggactacatttttaccatcagataatctgaaaaatgccatcaatcaattaagaagtttcgtgggcacggataaaaatggagaatacactgagtttattacgtagatgccccgtgcttttttttgagttatatcgcttatatctgcgatgaacaaacctggtattagccagcctatagaggcgcgaactcattacgtagtacaagctcccccgcaggggtcaccggggcgagtatatctactcattctggaatatagaataaccatgatacctacggaacataaacaactgccattgtcgataacagcaggagaaatatacccactctccccttaagaacaccacctgagcctttgcattattatagttacgattgtaatgagatacaccagagaggggcgtctgtttctccgggagagagatacttcgcactcagtcgcattaaaaaatcccagaaaaaccagcagtgccgggaaacagaagtagtcaaaattggcttgtatttgaacatgattatgacatagacaccatcacctgggatgacagggcggaataaacataccggttttataacctggaaatcttccgcccaaagatatgacttatacatgttgtaagtcgtgacatttagtcagcattgatcgaaagcagagttcgcatagaatcgaaaagttgtcgatcgcgttatatcggaagcaacggtcgttttttggaaataagcagggatctgcttcccttgagtacatcgcaaccgtgctttttagcctgcgcaaagccatactcccggatggcgtcagcccggagtccttcgaaaaggcctcaccgtgaggtgagaaactatctaccggagcgtgatcgctccaaatggtggttttttgcttttctgcatccggactcgccatcgaacgacgctaacacgtggtttccctgctgcgtttttctcctggccagcccgctgctagttaacgacaagcgcaggcctattctccatagaatcttttcgcaaacacattttcagatatcagataacacactgattaaaatcgccattttcccgctaaaagcggctaaaaacgcccttttctggaaatcgatccgcccaggtggctgccctgctttccctccagatggccaaatagcatcttatattccattttgcgctaaatgacagagaaatattctttaaataaccgttttcacagttctagtatgcaaaaatatcttaaacgagtgggtaaatggttatgtcactgtttcattccgtgagcgacctgatcggtcatactcccctgctccagttgcacaaactggataccgggccctgcagtctgtttttaaaactggaaaatcagaaccccggcgggtcaattaaagatcgggttgcgctgtcgatgattaatgaagccgagcgccagggaaaactggcgcccgggggaacgattatcgaagccaccgccggcaataccggcctcggtctggcgctgattgcggcgcagaaaaattaccgcctgatcctggtggtgccggacaaaatgagccgcgagaaaatctttcacctgcgggcgctgggcgcgacggtgctgctcacccgctccgacgtcaataaaggccacccggcctactaccaggattatgcccgccgccttgccgatgaaacgccgggcgccttttatatcgaccagtttaataacgacgccaatccgctggcccatgccacctccactgcgccggagctttatcagcagctggagggcgacatcgacgccatcgtcgtcggcgtcggatccggcggcacgctgggtgggcttcaggcctggtttgctgagcactcgccgaaaacggaatttattctcgccgatccggcgggttccatccttgccgatcaggtcgataccggacgctacggcgaaacgggatcctggctggtcgaagggatcggcgaagattttatcccgccgctggccaggctggagggggtacataccgcgtatcgcgtcagcgaccgcgaagcgttccacaccgcgcgccagctgctgcaggttgagggcgtgctggccggctcttccaccggcaccctgctcagcgccgcgctgcgctactgccgggcacaaagccgtccgaagcgggtagtaaccttcgcctgcgacagcggcaataaatacctgtccaaaatgttcaacgacgactggatgcgccagcaaggactgatcgcccgccccgaacagggcgatctcagtgattttatcgccctgcgccatgacgaaggcgctaccgtcacggccgcgccggacgacaccctggccgcggtctttacccgcatgcggctgtatgacatctcccagctgccggttctggaggatggccgcgtggtcggcatcgtcgatgagtgggatttgatccgccacgtacagggcgatcgccaacgcttctccctaccggttagcgaagcgatgagtcgccatgttgaaaccctcgataagcatgcgcccgagagcgaactgcaggccattctcgatcgcggtctggtggcggtgatcgctgacaacgcgcgttttcttggcctggtcacccgcagcgatgtattgaccgcctggcgtaaccgagtcgcacaataaggaattttttatgtcatctatccacaccctgagtgtacatagcggaaccttcaccgacagccacggcgcagtgatgccgccgatttatgccacctccacttttgctcagccagcgccggggcagcataccggttatgaatattcccgcagcgggaatcccacccgccacgcgctggagacggcgatcgccgacctggaaaacggcacgcgcggctacgcgttcgcctccgggctggccgccatctccaccgtgctggagctgctggataaggacagtcacctggtggcggtcgatgatgtgtatggcggcacttaccgcctgctggaaaacgttcgccgccgtagcgcgggtctgcaggtgagctgggtgaaacccgacgacctggcgggaattgaagcggcgatccgccccgacacccgcatgatctgggtggaaacgcccaccaacccgctgctgaagctcgcggatctcagcgccatcgccgccatcgcgcgccgccataacctgatcagcgtcgccgataacaccttcgcttcgccggcgatccatcgcccgctggagcatgagtttgatattgtggtgcactccgcgaccaagtacctcaacggccattccgatgtcgtcgccggcctggcggtggttggcgataactccgagctcgcggaaaagcttggctatctgcagaatgcggtaggcggcgtgcttgacccgttcagcagcttcctgacgctgcgcggcatccgtaccctggcgctgcggatggagcgccacagcgcgaacgcgctgcagctcgccgaatggctggaacagcagccggaagtggagcgagtctggtttccctggctggcctcgcacccgcatcatcagctggcgcgccagcaaatggccctgcccggcggcatgatttcggtggtggtgaagggcgatgaaggttacgccgagcgcatcatcagcaagctgcgctggtttacgcttgcggagagcctgggcggcgtggagagtctggtgagccagcccttcagcatgacccatgcctcgattccgctggagaaacgcctggcgaacggtatcacaccgcagctgatccgcctgtcggtggggatcgaagatcctcacgatctgattgccgactggcagcaggcgctgcggagggagtgattattccgacgcgcgggtcgttgtcagcgcgtcggccattccctgctgaaggtgggcgataaactgcgtcagcttcggcaggggccgacgatcctggcgccagagcagatgcacaggccgcggctgcggagtccacgcctccagcacccgaaccaggctgccgctggccagcgcatcggccagcagcacctccggctgcatcagcagcccggccccggcgatcgccgcctggcgcagcgcgtagccatcgttgcagcgcaaaaccgcatcgcgtttccagcgcacttctccctctacgcccggcagccgccactcgttgcgggcggtccagaccgtatgggacaggcagagatgatcggtgagatcttccggcgtcccgggcgttccgtaacgcgccagataagccggcgcggcgcagatcaccatccgatacggcgccaggtagcgagccaccagatcctcctgatggatctcgccgatacggatcgccagatcgaccccctcatccaccagatcgaccatccggttagtcagatccagttccacccggaccgcaggccaggcctgcaggaaggtggcggtcaggggcgcgatcacgctggcgccgaacgaggtgggagcgctcacccgcagggtgccggccggcgccagccgcagccgctcgaccgcgctttcggcgatggagacctgctccatcacccgtttcgcttcgtcaaaatagactcgcccggcgtcggtgaggctctggcgtcgggtgttacgctccagcagacgcgtcgccagctggctttccaactgggcgatatatttcccaaccatcaccgccgacagccccaggcgcgacgccgccccggtaaagctgccgcactccaccacggcaataaacgtctccatccctcgtaatttgtccatattgctaacctctggttagtaatgttctaacttttagccagtttatccgagattacttttattaaaaaatagcctctcacctcatcaggagtctgccatgaaaattatcgttatcggtgccagcggcaccatcggtcgcgcggtcagcgaagatctgagtcagagacatgaggttatccgcgtcggccgcacccggggagattatcagatggatatcacctcgcaggagagcgtcgaggcgctatttgcccaaacgggtgaagtagatgccatcgtctccaccaccggcaatctgcactttgggccgttaagcaccatgaccgacagccagttcaacctcggactgcaggacaagctgctgggacaaattcgcctggcgctggtcggccagcattttctgcgcgacggcgggtcgattaccctggtcagcggtattgtcgcgcaggaacccattgctcagggggtcaatgccacgacggtcaacgccggtctggaaggctttgtccgcgccgccgcctgcgaactgccgcgcgggatccgcatcaatctcatcagccccaccgtgctcagcgagtcgctggcggcctacggcgactttttcccgggcttccccagcgttcccgccgccgccgtggcgcaggcctatcgccgcagcattgaaggcgttcagaccggccgcatctacccggtcggctactagcctgtgccggcccgccggggccggcgcttacatcaggccgtcgttgcaggtacactgacggctgattgtctccggccgaaaaactgatgttgaaaaaattatccttaattatcccgctactggcgcttatcgcgctgctggtctggtggttcaccccgcattacaccgaggaagatgaagcttactaccgggcggtattttgcataatcgatcatgacgacagccgccagttcctccacgatatgcagaatatcgtcgaggggggaaattctgactacgcgctgcataaaacccattaccttccggcgctggggcagcggatgctggatacctggcgccagctcagcccgcaggaacagcaggcgctgcgtcaggacaagcagcgctgcggagagatattgcgcgaaaaacaacaggggaaatcatcctgacgagttggcaaaattgcagcatatcgccagcgtcgaataagattgtgctgttgatgaccggatcgctgtcacaaaatatccggtcgtcgtcgcgtcacagtacgacgttttttctgcggcggaatacgataaaaagtagttgatctggtacgaactaactcttattttgcttcacagttttcaaaatgagataaaactgatgcctgtcattattgccagtagtgttaaagaagccaaagcgttaattaacggtggaaaatacagggaaattattcttaacttcgatattgatgccgatgactttttctctctcgccagccattccgccggaactaaaatctccatcgccgaccgcaacgatcgctctccggtagaatcagcaaaataattaacccgcgagggacgtctatgtggttgtttattggaacctttgcgctggcttttctcgcagcgctgatgctggtctggctcgatgaccggatcgccgaaacggattgaccctgcgctggacgttaacgtcacgcagggctgcgcgccgccgaaaagcggcgcacagcagagacgttacagggaggccgccagccgctcaacggccgtcagcaatccggcttctgacaccgtggagtaagaaagacgcagggtacgggtatccggcttatcgtgataaaacgcttcacccgggacgtacaccacgccgttttccagcgttttcttcatccattccatggtatcgaacggatagcggaaacgcgcccacaggaacatccccccctgcgggcggctgaattccaggtgctcgccaaggcggctttccagcgcatcggccagcgccacgcacttcttgcggtagtcttcgcgaatcaacgcaatcttgttatccagccggttcagactgaggtattccgcagtgatcacctgcgacagcatattggtatgcagatccgccgcctgcttcacaatcaccgtctgctgcgccagccagtccggcatgacgatccagccgatacgcatccctggcgcgaggattttcgaaaaagtcgaggtgtaaaccacctgatcttcacagcccagctcgacagcatgctgatagagcgggcgccgaacggcgtcagtaaagctaatttcgccgtagggatcgtcttccagaatgacgaaatcatattttttcgccagctcaaccaaccggcgacgacgcgcctcgctcagcgttttgccgccgggattgccgaacgttggcaccaggtaaacagctttgacgcgggtggtctccagcaggtcggccagctgctccaccagcatcccgtcatcgtcggtgtcaacgctgagaatattggcctgcgccagctgaaatacctgcagcgccgccagataggtgggacgctcaacgacgatagtatcgcccggatcgagcagcgtacgggcaacgatatccagcgattgctgcgagccggaggtgatatagacctgggcggctgaacaggcgacgccacgggagtggcaaatttcactcaccgcctggcgcagcggcgggtagccttccgtcagaccgtactggaatgcgtcattaaaacgctcgctcatcaccttctgcaccgccagctccaggccttcggtatcaaacagttccggggccggaatgccgccgccaagcgaaatcacgccgggcagtttactgtgcttgagaagttcgcggacggcggagggcttgagttcacccgcgcgggcggcgagacgccgatcgtgcatactattttccttttctgtcttgttgttgtgttaattatcttggctttgttgcaggtgctccccggcggcgcttaccatgccggggctatccttttcagtacgttgtcacccggacaggggtatgccgctacccgggtttcgtacgtcatgctttgtctttcaaaacgattaacggctcgatatcgctctcttttttcaccaccagcgacgaatcgccgcgcaggcaggtaccgccgtagttaccgccgacggtaaatgtgcacacctgaatgtacttaccgtccactttcggcaggcaccacagctgctggtagatattcttgcgatcgacaaactggccgctggtcttatccagaagttcatcctgagggccgatcaggtcgatattgttcccgcagcgcccggaaataggcttcaccgcatagccggttttcgccagctcgtcgttaacctcaaaatcggtatccagcagatagcgatgatgcgggaacagcgaccacagcaccggcagaatggctttgttgccggggatcaccgtccacaggggttcgaataccaatacttcaggacgcagcaggacgtcaatcagccgcacctcattctgcggatgtccggtacgaatcggtaccgccgcgtactcctcggcgctgacttcgcgcacctgctcaatggcggtttcccatgcccaggttttccagacgcagttgaccagccgcccgtcggcgtcgatcagctgaccggcagcgtcccagcgcagctcatcaaggccaaagagaattttgctctcaaaaccggcctgggtcagcgaacgctgaataaactgcgcgtggtagttctcttccagatccttgtcctgcatgatgtggacgaagggccgcgcccggctgtgtttccacgcccccgccagctcatcgagcagaccttccgccggattgtggccggtgccgtagtagccctgcttcagccactgttcgaggatcagcccgccttcggtatggcaggaagcggaatcggcattgtactcgtacaccttcagcccgcgctcgtccatgcaaaaatccatgcgcccggtgatcatatgatgacggcggcgctgccacgagaggcgcagacgaggccagagaattttcggaatatcgaacagcgccagtaggttgtcatccttcatcaccttatcggtggcgtgcagatacatcaggtgcagctcgttggtggctttgatcagctcctgttcggcactttcgctgatggtgaaatactgatagggatcctggttgatgaaatgaccgttggctgccacataggctttctgcagcgggtctttctcgttcagccatttaccgcgaaactggccgttgtttggcagccgcgcgcctttgatggccatcgcctcgcccggcagcaccggctgcggcaggctgtgttcggtatcggcggtctggatcatccagcctaaaatttcggtatcggcaaaggtatctttgatggtgtaccggccgtcgttgacctcgagggtcagctcgcgggtccactgctggccctgcggcagcggcgagtgaatcacgttctgctcggcgatacgcaccttattgccgacaagctgggtgatcaccgccacatggccggtgtgcttaaactcgccccccttctgccagatcagcagcgaaccagcgataggcggacggcgggagccgttggcgaaggcctgcagcggcagaatattgtcattgaccacttcgcgcaggaaacgcagggagaagatttcataagccatccccacatcggtgaagacaaagccataggtcaggaacagaaagcggcgcgcaaactccacgcactgccatttatgccccatatactcattgccgatgtagctgcgaaacgtcgcgtcatccgggtagtcctgcggatttaagctactgtaattcgatgaataaatcgctacgccaccgggtgcatagcctaacaatgtcccaaacggggcgtcactgcttgtcgatcctttgctcatttagcctgacctcaaattaatgcagcccgggcagttggcgaaacaaaactccctcttcttatcctgccgcaggcacttaccagacagaggtgtaacgatgataccactcattcgtttcgctaatcgtgccgttaaggaaaataaccctgcagccggaaacaaaagtgatatcgttatcggtgatataacaaaaaaacaacgcaacatcaggagtcgacaatgagcacaccctcgcatctgaatgcccaaccgctggtctggggacacggcccgcggacgtttgaggtgttccttgagcccacctgcccctactctgtccgcgcgtttaataaactcgacgatctgctcgatgaggtcggcgccgataacgtgaccatcaagatacgcctgcagtcgcagccgtggcatctgttctccggggttatcgtccgctgcatcctcgccgcgtccaccctgccgcacggcagagagcaggcgcataaggtgatgcaggccgtggccgaccatcgggaagagtttgagtttaccgatcactgcagcgggccgaatatgaacgccacgccgcagcaaatcattgagcgcattgaacgctacagtcacgtgctgctgggggccgcctttgcccgcccggagctgcaggacgtgatcaagtggcacagtaaatacgcccgtcagaacggcatccatgtctcgccgacctttatggtcaacggcctggtgcagccggatctgggcagcggcgatgatgtcagcgtgtgggccgcgcggattatggcctgaggtcacctgctacactttttgtacatccacgaaaaaggcaaaccagcatgtcagagcaaaactaccagccaccaaaagtgtgggaatggaagcaaaacagcggcggcgcgttcgccaacatcaaccgtcccgtttccggcgcgactcatgaacgcgtcctgccggtgggaacccatccgctccagctatactcactcggcacgcccaacggccagaaggtgacgatcatgctggaagagctgctggcgctgggcgtcagcggcgcggagtacgacgcctggctgatacgcattggcgaaggggatcagttttccagcggctttgtcgagatcaacccgaactcgaagatcccggccctcagcgaccattccaccacgccgccgacccgggtatttgagtccggcaacattctcctgtatttagcggaaaaatttggtttcttcctgccgaaagatcctgccggtcgcaccgaaaccctcaactggctgttctggctgcagggcgcggcaccgttcctcggcggcggcttcggccacttctataactatgcgccagtgaagatcgagtacgcgatcgaccgctttacgatggaagccaaacgccagctcgacgtgctggacaaacagctcgcccgcggtcgctatgtggccggcgaggagtacaccatcgccgatatggctgtctggccgtggtatggcaacgtagtgctgggcaatgtctataacgcggcggagttcctcgacgccgggagctataaaaacgtgctgcgctgggcgcaggatgtcggcaaccgcccggccgtcaagcgcggacgcatcgtcaaccgcaccaacggcccgctcaatgagcagctgcatgagcgccatgacgcccgcgactttgacacccaaacggaagataagcgccaggcgtaagatcttcaccctttcccgttgacgggaaagggttcccactacaggacggttccgcctgcgaagccgtcctgtttagctttccagccgatagcccgccagaaaatagcgcatcgccatacccgacccaccttctttgaagaaatccatcaccatatccctgtccaggccatagcgacgggtgaggatccccgcttcccaggcgctgagctggcggtcgccggttttttcaaacatgcggtgcgagtagccgagcacaaacccgcgtttatagtcggcgcaaaaattcgccgcatgcgcggcggtgtcagcataggatgcctgtagccccgccattaagcctttgccaaaatgattttccatcgcgccctcccaatcgttatataataaattatatagcgtttttttgagcgagcggtagcgctatttatgacggttgcgctagcgtaaatacttctcaaaccatgccagcgtgcgttgccaggccagatcagccgcagcccgatcgtagcgcggcgtggaatcattatgaaagccgtgattcacgccctgatagaaataggcctcgtagactttatggtgttccttcaacgcctgttcataggcaggccagccttcattaatgccgctatcgaggccggcatagtgcagcagcagcggtgctttaattttatcaacctccttcagcggcggctggcgaccgtaaaacggcaccgcgcaggccagctccgggatagccaccgccgccgcgttgctgacgccgccgccgtagcaaaaaccggtgataccgaccttccccgtcgcctgtggatagttcgccataaacgcgaccgccgcaaaaaaatcattcatcagcttcacgggatcgactttctgctgtagggcgcggccttcatcatcattccccggatagccgccgacggcgctcaggccatccggcgccagcgcgatgtaccccgctttcgctacccgccgggctacatcttcaatataggggttcaggccgcggttctcatgcaccaccaccacagcgggcgctttgtcggctatttttgtcggcgtcaccaggtaagcccgcacttcgccgtgaccgtcaggagagggataatgaatatactccgggcggatatccgggtcggtgaacggtacctgctctgccagggcataatcgggcttcagcagattaaacagcgccagcgcggtcatcccgccgacagtatatttccccgccagctggagaaactcgcgtttactgattttgccgtgggcatagtagtcataatattcgagcaactgctgcgggaaatctttggccgttaatcgcgtcatcaccctgcctccgttgttaagcgctctttaagcaaagcagaagcccggacatacgccagcccagaaaagcatgatacggggagaaacagcccagcggctaacaccgccgggagagaagggatcagtgtttcactttggtcagacgatcaaggtagcccatcacaaaggccgaaagcacgaaggtcaggtggataatcacgtaccacatcagcttattgtccgggacgtttttcgcatccataaacacccgcagcaggtgaatagaggagatcgccacgatggaggcggcaaccttatttttcagcgaagtcgcgtccattttgcccagccagctgagtttttctttaccctcgttaatatccagctgcgagacaaaattttcatacccggagaacatcaccatcaccagcaaaccgcccaccagggtcatatccaccagcgacagcagggtcagaatcatatccgactcactgacgctaaaaatatgcggcagtatgtggaagatctcctgaaaaaatttgatggtcagcgcaatcagaccgagcgagaggccaaaataaaccggcgccagcagccagcgcgaggcgtacatagcattttccagaaagcgttccataagatcctgtcagttaacataaacggccgccattatatcgcaacagggtaacgcttatgcaacatcagccgccagcgtcatctacaggcggccagaaacggtttctttaaagtatgacctcaaagtcctgcaaagcggagtagccctcgctttgtaggccaaccattgaagcagccagcaggccaaatttcgcgccgacccattttcccttcccggcagcaaaacaaagaggaaccttccgccactcctcctcggctcgccaggaaaattgacacaggccgccttcgcctacggccacctgcagctgacacttgccgcacttaagctcagcaagaacctgacgagtttcgcgcaccacgcccgcatcgctcatccaaccgtgtcgccacacgagccggtaacccccttgcccaaactccaccagcaaagcggcgtagcgttcgccgtatacgatcaggcctccggcatcaccgtcctgagcggcatataacgttacgcttgttttcgcgctaaaagttagcgccgggaatttctgcagcaacagctgcggcgcccagtataacgctctctgtccatcgacttcggataatgggacgcagcgtaatcgaagttcgccttccgccggcagcagccactcagggctggggttagcctgccactgccactgtattcccggttggccttgcgcaaaatagtcgctggtttgcggcgccaatgccggtgaaggcgttaaccctttaggacgcggccaacgtaaaaccggctgtccgacgccgcagttgccaatctgctcaccgatacgcggccagccatcgttaccccaggacatcggctggaggtgaaccacgcggccatagaggtgtaagtcctggaaatgaacaaaccagcattcgccctcctcaccctccacccagccgccctgatgtggtccatttatcgaggtgtttccctggaaaagcacgtttttggcttcccagggccccgtcatctggcgcgcgcgcagtaccgtctgccagccattttcaaccccgcccgcaggagcaaagatgtagtaccaaccggcgcgttgataaacctttggaccctcaagggtaggtaaatcgcagcagccgtcatagataatctgcccttcgcccagcaattcgctggcgtccggcgccatcgcaaacaactgcagtttatgcttgatgccgctgcggctatgggcgaaggcatgtaccaaccaggcctgaccattgtcgtcccagaacgggcagggatctatccaacctctggcctcgcgcaggcagtgcggagcgctccatttcccccacggatcctcggtatggcagataaaaataccttcatctggcgtgctgaagcagacccacagcttgccatcgtgccagcgaatcgacggcgcccatacgcccttacccggctgataccggtcataaccaggtagcggcagttcatccataacgtggttgatgatagtccaattaaccaggtccgttgaatgcaggatcggtaaagcgggcacatggttaaaactggaagagaccataaagaaatcatcgcctacgcgcacgatatccgggtcggaataatcggcgcataagataggattctggtattcagaaggggtcatatttcgcatctcctcaggccttttccggaacggcgtttagcggcaaatgcgtctctgaatgcccctgctgctgacgcatggacagctcgcgctgaattgtctgcatcattttgtcatccagtttatagaaacgcgccagccaccacaggagcaggtaagatagtgatggaccgagggttaacagccccacaattcccattgtcgccagcggagtctgcgccgttacgcccgcctgatagccaaatagcccaagcgaaaaacctacggcggcgccagcaaccgccatgcccattttcaaagcaaacagattaccggaataggataatcccgtgatgcgacggccaaacttccattcgccataatcggcagcgttggccatcatgttccatttaaacggctggtacatctgatggaagaagccgaccaggaagtataaagggaacaccaccggcagccaggtcggcggcacaaagaacattacgacgccaaccaggaccagcaggaggttgatatttttaaacagcgataccgcgcgatagcgcttggccagccatccggcggcgatgctgccgataatcgtgccaacgacgctggtggaaacaaatgctgatttcatggccgttcccgccgctgactccacaccgcctaacatcaggtaggttgcataatagagcgtggcggcgctgcgcataaccccggccatactggagaaaaaagtaattatcgccacaatacgccactggtcattcgccagcagctgacggaggtcttcgcgtatgctcccctgctgttcaacagctggagccacgcgttctttggtagagaagaagcaaaaagccagcattacaatagcgatcgcgcccatgattcccattgtcgcctgaaaaccaaactgcttattttctttaccgaaaaaatccaccaggaacagggttgcgacagaaaccatcagaccggccagagatgagatcgtaaaacgatatgactgggctgaaaggcgatccttctcatcacgcgtaatgactccgcccaatgcgcagtagggaatattgataaaggtgtaacacagcatgagtaaggtgtaggtcaggtaggcataaaccagtttacccgatgcgccaaattccggagtcgtgaaggtcattaccgccagcacggcataaggtacggcaaaccagataagccacgggcgaaaatggccccagcgggtctttacacggtctgcaacaatgccggttagcggatcggtaatcgcatccagaacccgcgtcaccaggaacatcactccgactgcggcagcagaaagcccgtaaatatccgtataaaaccatgtcagaaacatggttaccgaagagtaaacgataccgcaggctgcatcccccatgccatatcccagcttctccgcaaatgacagtttattatcgtgattcacaatataatccctctcagatgaagtggtattcactgtagaggcaggataaaaactatcctattgtcatttttcgcatcgggtttatgttttctgttaactgagaaagttgtcacacatctataagattggtcttacaagttattgcgccacctattaaaaagctggcgcaaggccagcctgaggagaaaagtggaaagggggaggttacttcgctttgacggtctcttcgcccaccagcccgatcttgagatagcccgcctgatgcagggtatccatcactttcatcatcgtctcgtaatcgacggttttatccgcgcggaagaagacggtggtatcttttttgccggcggtcaggctatccagggcgttaatcatattcgcttcggtaaccgggtcgttgccgaggaacatgctcttatccgccttcaccgacaggtagatgggtttttccggtcgcggttgcggctggctggaggaggccggcagattgaccttcacgtcgaccgtcgccagcggcgcggccaccataaagataatcagcagaaccagcatgacgtcgataaacggcgtcacgttgatctcatgcatttcgccgttatcgtccaggttttcattaagacgcatcgccatagccgatcaacctacccgtaatttctgcgcgctgcgcaccggcttcacgccgctggcgctgaggtccagatcgcggctttgcagcaggagtacctgagcggcgacgtcgccgagcgaggccttgtagctgccgatcatgcgggcgaagatgttatagatgaccaccgccgggatggcggcgaacaggccgatggccgtcgccagcagcgcttctgcgatgcccggcgctaccaccgcaagattggtggtctgggtctgggcgatgccgataaagctgttcatgatgccccagacggtaccaaacagacccacaaacggggaaatggcgccgatggtcgccaggtagccgttaccgcgccccatatggcgaccgaccgccgcaacgcggcgctcaaggcgaaaaccggttcgttccttgatgccttcattgtcttcggcaccggcagagagttcgagttcgttctgcgcttcattgataagctgggtggtgaggcttttcgcctcaaaggcgctggcgatatcgctggcctgatcgagagagcgggcttccgccagctgctgctgttcacgtttgaggcgacgcttgctggcgaggatttccgcccctttaccgaagaagatggcccatgtgacgaccgacgccagaatcaggccaatcatcaccaccttaacgacaatatcggcatgatgatacataccccaaacggagagatccgcctgcatcaaattattacccacgctctatctccacgacgataatcacaaaatctgcccacaataatatcaaaacgacatcgaattgatagtggttctcattagtatttacactgtgcagcaaatcacgtttattttccttgcgcttacgcagtaaaaaagcggctaaccgcgggcctggtaaaattttcgcctgtatcggcggtgcgctggtatagaaaagcagattcatgttagtttagacgtccagacgtataaaaacaggttcgtcaacatggctgataaacatcttgataccgcgctggtcaacgccgggcggagcaaaaagtacacccagggctcagtgaacagcgttatccagcgcgcgtcatcgctggttttcgacaccgtcgaggccaaaaagcacgccacccgcaatcgggccaacggcgagctgttctacggtcgtcgcggcaccctgacccatttctcgctgcaggaagcgatgtgcgagctggaaggcggcgccggctgcgccctcttcccctgcggcgccgcggcggtggctaacactatcctggcgtttgtcgagcaaggcgaccatgtgctgatgaccaataccgcctatgagccaagccaggacttttgtaccaaaattctcgccaaactcggcgtcaccaccagctggttcgatcccttaatcggcgccgatatcgcccgtctggttcgccctgagacccgcgtggtgttcctcgaatcgcccggctcgatcaccatggaagtgcacgatgtgccggcgatagtcgccgccgtgcgtcaggtcgccccggaagcgattatcatgatcgataacacctgggcggcggggatcctgtttaaagccctggattttggcattgatatttccattcaggcaggcaccaaatacctgatcggccattccgacgccatggtgggcaccgcggtggcgaacgcgcgctgctggccgcagctgcgtgaaaatgcctacctgatggggcaaatgctggacgccgatactgcctatatgaccagccgcggcctgcgcaccctgggcgtgcgcctgcgtcagcatcatgaaagcagcctgcgcatcgccgagtggctggcgcagcacccgcaggtggcgcgggtaaaccaccccgccctgcccggcagtaaaggtcatgagttctggaaacgtgatttcaccggcagcagcgggctattctcgtttgtgctcagcaagcgcctcaatgatgccgaactggcggagtacctcgacaatttcagcctgttcagtatggcctattcgtggggcggctttgagtcgctgattctcgccaaccagccggagcaaatcgcccacattcgaccggatgctgaagtcgacttcagcggcacgctgatccgcctgcacattggtctcgaaaatgttgacgatctgcaggcggatttagcagcgggcttcgcgcgtatcgtgtaaagtgacagtcagtggcaacaatagcggacgctttttagcaaagcggccgcttttgttgcgcccgggatcaaggtgctcgggcctcttcaggagtacactagtcaacaatacggtaccacttaggaaagtccatggttgtcattcaagagattgtcgccgcgctgtggcaacatgattttgccgcattggcgaaccctcacgttgtgggcgttgtatatctggttatgttcgcgaccctgtttctggaaaacgggctgctgcccgcctcctttttaccgggagacagcctgctgctgctcgccggcgcgctgattgctaaaggcgtcatggactttgtgcccactatcgccattctgaccgccgccgccagcctcggctgctggctgagctatgtgcaagggcgctggctgggcaatacgcaaacggtgaaaggctggctggcgcatctgccgcataagtaccatcagcgcgccacctgcatgtttgaccgccacggcctgctggcgctgctcgcgggccgttttctggcgtttgtccgcaccctgctgccaaccatggccgggatttctggcctgccgaaccgccgcttccagttcttcaactggctgagcgccctgctgtgggtctgtgtggtgacgggtcttggctatgcgctgagcatgatcccgtttgtgaagcgccatgaagatcaggtgatgacctgtctgatgatcctgccgattgccctgctgctggctggcctgctcggcacgctgttcgtggtcattaaaaagaaatattgcagcgcctgacgcttacctgccggggggcctgcgcccgcccggccgccctttcccggtattacatcccctgcatcgtgcgaatacgcgcggcgtcttctcccggcgtcaaaccgaagtagcgcttaaactcgcggctgaactgcgaagggctttcatatcccacgcgcatcgccgccgcgctggccttcatgccgtcatggatcatcagcattcgtgctttgtgcaaacggtagtttttcagatactgcaaaggagaagtgctggtcaccgctttaaaattatggtgaaacgctgacacactcatattcgcttccgccgccagccgatcgacgctgaggttttcggtgtactggctttcgatatgcttgagcacgcgacttatcaggctgaagtgggtctgccggctgaccagcgccaacagcgcgccgccgcagggccccgtcagcacataatacagaatttcgcggacgatttgcttgccaaggatccgtgcgtccagcggccgctccatcacgtcaagcagccgttcggcagcgcacagaatatcctccgagagtaccgcggagtttatcccgctggaggcgaccgcgggctgaaacagcggatcttcgccaatatccatcagcagctcttgcagttgcaggatatcgacgttcaggcgcatcccggcgaggggcacctccggggtggcaaaggtttcgcactcgaaaggtagcggcacggtcagcagtaaatattcgtttgtatcgtagcgaaaagtccgttcattgatataaccaattttatggcccgaaaagagaaaaacgatccccggctgatacatcaccggcgtccggggccccggttgcgttccgtacagcaaacggacgtcaggcagcaacgaacttaacatttcgtgcttatctttcagcaggttaatcttctccgttaatgtccgacatatctctgcgtgttgcattgccaccgtctctcccgatgtttcttcacctgtacattgtgcgcaggccgctacaaattctccagccatatggagaaataggcaagacatcggcaggaatgtgcattgagggtcaacggcgccaggaccacaataaccttcatcgggcagcggtatcgtccctgtcgacggttttactctttggaggacttaagcaatgaataatttcgacctgcataccccaacccgcattctgtttggcaaaggcgcgattgaaaagctgcgtgaacagatcccggcggaagcccgcgtactgatcacctacggcggcggcagcgtcaaaaaaacaggcgtcctggatcaggtcctcaccgctctgaatggcctggatgtccttgaatttggcggcatcgagccgaacccgtcttacgaaaccctgatgaatgcggtgaaactcgcccgggaagagaaagtgaccttcctgctggcggtcggcggcggttcggtgctggatggcaccaagtttatcgctgcagcagcccactacgacgcggatatcgatccgtgggaaattctggaaacctatggcagcaaaattgccagcgccattccaatgggctcggtactgactctgccggcgaccggttctgaatccaacaaaggcgcggtcatatcgcggaaaaccaccggcgacaaacgcgcgtttatgtcttcgcacgtccagccgcagttcgcgatcctcgatccggtttatacctataccctgccgccgcgccaggtcgcgaacggcgtggttgacgccttcgtccataccgtcgagcagtacgtgacctacccggtagacggcaaaatccaggaccgtttcgccgaaggcattctcctgaccctgatcgaggatggcccgaaagccctgcaggaaccggagaactataacgtgcgcgccaatattatgtgggcggcgacgcaggcgctgaacggcctgatcggcgcaggcgtgccacaggactgggcgacgcatatgctcggccacgagctgacggcgatgcacggcctggatcacgcccagacgctggctatcgtgctgccggcgctgtggaatgagaaacgcgatgccaagcgcgagaagctgctgcagtatgccgagcgcgtgtggaatattaccgaaggctctgacgaccaacgtatcgatgccgccatcgccgcaacgcgtcagttcttcgagcagatgggcgtgccgacccgcctttccgattacggtctcgacggtagctccatcccggcgctgctggcgaaactggaagagcacggcatgactaaacttggcgaacatcaggatatcaccctggacgtcagccgccgtatttacgaggctgcacgctaagcgctccccgcctgattcacctctccttacgttaaacaaacgccggggagaggtgtttttactaccgtttttagctatttcgtccagacttaatgctacccctcggcggatcctgcttcgccgagttcattaacaggaggaaggcatgacacatccaaccgttataaaactgcacgacggcaacctgatgccgcagctgggtctcggcgtgtggaaagctggcaacgaggaagtcgtctccgccattcataaggcgctggaagtcggttatcgctcttttgacaccgccgccgcgtaccaaaatgagaccggcgtcggcaatgcgctgcacagcgctggcgtcaaccgcgatgagctcttcatcaccaccaagctgtggaacgacgatcaaaaacggccgcacgaggcgctgaaagagagcctcagcaaactgaagctggactatgtggatctctatttaatccactggccggtaccggctatcggccattacgtcgaggcctggcaggcgctgatcgagctgcagcagcaggggctgaccaaaagcattggcgtgtgtaatttccaggtaccgcatctgcagaagctgattgatgaaaccggcgtcgccccggtgatcaatcagatagaactccatccacttatgcagcagcgtcagctgcacgcgtggaacgccacccacaagatccagaccgaatcctggagcccgctggcccagggcggcgaaggcgtcttcgatcaaaaagtcatccaccagctcgccgataagtacggcaaaacgccggcgcaaatcgtcatccgctggcatctcgacagcggtctggtggtgatcccgaaatccgtcacgccgtcgcgtatcgcggaaaactttgacgtctgggacttccgtctcgacaaagatgagctgggagcgatcgcgaagctggaccagggtaaacgtctcggtcctgacccggatcagttcggcggataatgctctctcttgccatcgcctttagcgcctcggcgttaaaggcgatcgcagaccagatgaatatcctctggctccagcgcaaacagcgccgggtcgggcttatccgctaagcgacatccctgagccagataaaaatcgacggtgtttttgttggggatcgacgagatatagaggccggacgcccccatttctggcagctggtgcagggcatactgaaacagtcgccgcccccagccctggccgcgctttcccgccccgacataaaagaataatagctggcgcagctcgccattcatgccgcgaggcagcgtatccagcgccgctgcggcaatcatctgctcatcgtcaaaaaaggcgaaaaaaataccgccgcgatcgtaacaggcctcgtgaatcggagtataaacctgacgatcgtgagggtcccagccacgcacgtcataatattcccgataagcccgcagctgaccgttatcgagacggtagagcgtatcgataatttcgctgcggtctatctcccagagctggtccagttgttgtcgcgacaggatgaccggcgtcatcacctctctccttttttcacagatgttcccggcgagcgatcccgccgggccagccgcttagcgtgatacggccttcggcttaacgcgttttttcgcgcccgcagcggcaggcgtctggcgctgatgggcgatcggcgtgtgcttggtcaacgccggacgagtatggcggttctggcgacgcgcttcacgcatttcgtccagggttggcgctggcaccaggcagtcgcggcgggagccaatcaggtgcttcttgcccatcgcctccagcgcctgacggatcagcggccagtttgccggatcgtggtagcggagcagcgctttgtgcagacggcgctgtttatcgcccttcggcactaccacctcttcgctcttataaccaattttacccagcgggttcttgccggtgtaatacatggtggtcgagttcgccagcggcgacggatagaagttctgcacctggtcgaggcggaagcgatgcttcttcagccacagcgccaggttcaccatatcttcatcacgggtccccggatgagcggagataaagtacgggatcagatactgctctttacccgcctgcttcgaataggtgtcgaacagctctttaaagcggtcgtagctgcccattcccggcttcatcatcttcgacagcggtccctcttcggtatgctccggggcgatcttcagatagccgccgacgtggtgggtcgccagctctttgatatagcgcggatcttcgaccgcgatgtcatagcgtaccccggaggcgataaggatcttcttgatgcccttcagctcgcgagcgcggcgataaagattgatcgtcggctcatggttggtatccatgtgcgggcaaatatccggatagacgcaggagagacggcggcaggtctgctcagcgcgcggcgatttacagcgcagcatatacatgttggccgttggcccgccgagatcggagatcaccccggtaaagccgggcacggtgtcgcgaatggcttcgatctcattaatgatcgaatcctcagaacggctctggattatgcgtccttcgtgctcggtgatcgagcagaacgaacagccgccgaagcagccgcgcatgatgttgattgagaagcggatcatctcatacgccggaatacgcgcatcgccataggaaggatgcggcacccgcttgtacggcagcgcgaagacgctgtccatctcttcggtggagagcgggattgccggcgggttgatccagatgtagcgctcgccgtgcttttgcatcagcgcccgggcgcagccggggttggtttcgtggtgcaaaatgcgcgaggcgtgagcgtacaggaccttatcgcctttcaccttctcgaaggaaggcagcagcacataggttttttcccacggtttgggccgcggcggctgcacagtaatgcttttcgcttcctgttttttcggcgcgaccggtttgttatcggcgcacggcagatcttcaccgtacggatgcgggatggggtcaattttaccgggcgtatccagacgggtggagtccacgccgctccagcccggcagcgcctctttcaccatgatggcggtattgcgcacatcgcggatctggtcgatggtttcgcccatcgccaggcgatgagccacttccaccagcggacgctcgccgttgccgaacatcagcatatcggccttggagtccaccagcaccgagcggcgcacggtgtcggaccagtaatcatagtgggcggtacgacgcaggctggcttcgatgccgccgaggatcaccggcacatctttccacgcctctttacagcgctgggtatagacgagggtagcgcggtccggacgtttgcccgccacgttacccgccgtataggcatcgtcatgacgtagtttacggtcggcggtgtaacggttgatcattgagtccatgttgccggcggtcacgccgaagaacaggttcggttttcccagacgcataaagtcgtctttgctgttccagtccggctgggagatgatcccaacccggaaaccctgcgcttccagcatgcggccgcagatagccatcccgaagctcgggtggtcgacataggcgtcgccggtaaccagaataatgtcgcagctatcccagccaagttgatccatctcttcacgcgacatcggtaaaaaaggcgcagggccaaaacaggcagcccagtattgcggccaggaaaaaaggtcacgatccggttggatcagggatattgcgctcatattgcttccggggaaaatgataaaaaaataaccaaaagggcgtggattataagccggaatgatagtggaaatgaaggaggattttctcaaaccctgaccgtgcgccggccagggtcaaagagtttacggcgcgggattcaccagcatctggccgatcgagccgcgatcggcaagctccagcgtctgactcagatactggaacgggaagtgcggccacgacggttgagcgtaatagaccagcagctcaacctgcccgtcgacccacacggtgtccttccagccgcgatcttccgggaaaggagacgagccgttgacattacggatctggaacatcaccccttcaatatggaacgactgcgggcggtcggcgcgcaccgtccagcgctcccaggtcccctgctgcgccgtgatatcgatacgctgcggatcccacagctggccgttgatgcccggatcgtcgccaagggtgatatcccggctgcggatcggcgtaccggagagcagctcggtcggcagcaggcgcaccggcagactgtcggtcaccagcggcagcagcccggtcggacgcagcgtcagcaccagcgtggagaccaggatgcttgacggttcaaaaaaaccgcggatacggtcgacgatgctcgccgcttcgccgcaggtaatggatacttcatcgccgttagtcatatcgaccagaatttcacgccgctcccccggggccagcgatagctgcttgagcgaaaccggcgccggcaggaatccctgatcgccggaaatcacatgcagcagtcggccatcgctcatctgcagctgatagcgccgggagttggaagcgttcagcaggcgcaggcgcacccagccgcgcgacacttcaacatacgggctctgcacgccgttaaccagcagcgtgtcgcccacaaagccgccgctgcccggttcgctatattccggcgtgccgaagttatccagccgtttatcctgaataatcaccgggaagtcatcgactccatagtggttagggatcggcaggttcttgctgacctcgtcttccaccagccacatgccggccagaccgttgtaaacctgtttcgccatccggttcggcgtgttggcctgataccacagcgtcgccgcgctctggcggataggcagcaccggcgcccagtcggcgttcggcgacatcatgcgcgccgcgccgccaatcagcgggccaggcacctgcagaccgcggatggtcatcgccacgttctccgtcaggcggttgctgtagataagcttgacgtcgtctccgttccagacgcggatcgtcggccccatatagcggccattgatcccccagacgggggcgcgggtgccgggggtaaacgaccagtgggaacgctgcagcgtcagaaacagcggctggccgcgacgagattccagcagcggcggaaccggcagcgcaggctgctggccggcggcatgggccttcagcggcgcggcgccagcgcacagcgctacgccggaagccttaataaactgacgccgactgagtgacatattaactccatgacatactgacaaatgaaaaagggaattcgtttcccgccagcaatacgcgcgcgttggcggcgtttcctgtcttattgctttccagccgcttcgcgctcggccacttcgttgtccagatcagcgattttggcggccatcagctcgcggcaatgcgtcgccagcgcgcgcacgttgtctttaccaaactgcgtggtatctaccggcggcagcatttccacaatcaccagaccgttgttccagcgattgagctttattttattcgatgtattcgagacacacaccggaataatcggcaccccagcggcaatagccgcgtgaaaagccccggttttaaacggcagcaggccgcggccgcggctacgggtcccttccgggaacatccagaacgaaattttacgctttttaaaagcgttgacgacttcggcaatagtgccgtgcgctttggttcggttattacggtcaatcagcaaattgcccgtcagccagtacagttggccaaagaacgggatccatagcaggctctttttacctacggtgaccgtcggagcctgcacgatattcgacgccgtcaccatatcatagttgttctggtggttagcgatgtagatcgcgttgccatagctttccgcgtcggcgggtttgcgtagctctaccttgaggccaaataccggagataaacggccaaacagatggccgaaagtggcaacgtgttttggattacgtgggctgaacaagcagtacagacagccaagtacgcatactacgatgcaataaatgaccacgaaaattactcgaaaaatgaatagcatagctacctctaaaacccaaaccgcttagaattattcgctgctggcagaaggcaggctcacaagttctgcgcaggccgggaccgttcttcctgggtccctgatgatggacattgttaatcgcaacgcctgaataaacaacgattttgcggcattttttcgtctcctcccgtcaaagacgggaggagacgcgcttactcttcgctatcgcctgccgcggcacgacgcggcgagtcaatttccacgcggtcaattttctgcagcccgcgcatcagcgaaccgcggcggccgcgctcgccggtgactttttgcagctcttccggacgcagtttgatcttccgtttgccgacgtgaatggtcagcgtactctgcggcggcagaacaaacagatgtgccagaccgtcctggccggctgcggcttccgccgccggaatgctgataattttgttgcccttgcctttcgacagctgcggcagatcgctgaccgggaacatcagcatccgcccggcggcggtgatggccagcagcatatcggactcatcctcaatcaccagcggcggcatcacgtgcgcgttgtcaggcagggtgattagcgctttcccggcacggttgcgcgccaccagatcgttgaaggtacagacgaaaccgtagcccgcgtcggaagccatcagcagtttctgatcgtcgctttccattagcatatgctccacggtcgcgcccggcggcagggtcagtttgccggtaagcggttcaccctggccacgcgcggaaggcagagtaatcggatcgatggcatagctgcgtccggtggtatcgataaacaccaccggctggttgctcttgcccttcgccgaggctttccagctgtcgcccgccttatagctcaatccctgggcgtcaatgtcgtgtcctttggcgctgcgcacccagcccatctgcgacagaacgatagtcaccggctcagacggcagcatgtcatgttcgctcatcgctttcgcttcttcacgctcgtgaagcggcgagcgacggtcgtcgccgaaggcatcggcatcggcctgcagctcttttttcagcaggttgttcatcttacgttcagacgccagaatcgcctgcagctggtcgcgctctttttccagctcgctctgctcgccgcggatcttcatctcttccagtttggcgaggtggcgcagttttaattccagaatcgcttccgcctgggtttcgctgatgccaaagcgcgacatcagggccggcttcggttcatcttcagtgcggatgatctcaatcacttcatcgatattaagaaacgccaccagcaaaccttcgaggatatgcaggcgcttcagcactttctctaaccgatggtttagacggcgacgcacggtatcgcgacggaacaccagccactcgctgaggatctccagcaggtttttcaccgccgggcggccgtcaaggccgatcatattgaggttgatgcggtagctcttctccagatcggtggtggcgaacaggtggttcatcacctgttccatatccacccggttggagcgcgggacaattaccagacgggtcgggttttcgtggtccgattcgtcgcgcagatcgtcaaccatcggcagctttttattgcgcatctgcgccgcaatctgctccagcactttggcgccggagacctgatgcggcagcgcgctgatcaccaccgcgccgtcctctttactccacaccgcgcgcatgcgcactgagccgcgcccgttctggtagattttgcgaatttccgcccgcgaggtgatgatctccgcctcggtcgggaaatccggcccctgtacgatatccagcagttcgtcgagggtggttttcggctgctcaatcagcgtaatcgccgctttggccacttcccgcaggttgtgcggaggaatatcggtcgccatgcctaccgcgatgccggtggtgccgttcagcaggatgttcggcaaacgcgctggcagcattttcggctcctgcagcgtgccgtcaaagtttggcacccagtcgaccgtcccctgccccagctcgctgagcagcagctcggcatacttcgacaggcgggattcggtgtaacgcatggcggcgaaagatttgggatcgtccggcgccccccagtttccctgaccatccaccagcggatagcggtaagagaacggctgcgccatcagcaccatcgcttcatagcaggcgctgtcgccgtgcgggtgatatttacccaacacgtcgccgacggtgcgggcggactttttgaatttcgcgctggcgttcagccccagctcggacatcgcatagacgatgcgacgctggaccggttttaagccatcgccaataaacggtaatgccctgtccatgatcacgtacatggagtagttcaggtaagcattttccgtaaattcatgcagcgcaaggcgctctgccatatcgctcattaatcgtggatcctcaatctgggtaccgaccgttcggacggcaaaactacccgcgataatacccgatctcacgccctgagtcacaggccgtgagatcgctgaggattccgtcacgcttaatcaggccagcggcagataaatatcggtttgcagttcatgctcagccacctcatggacaaaattgaggtaacggaagtacaccggaaaatcccgtaacgtctcgcctgaagcgggtaaccagtcgcgatagagaaaccaaacgctgttcgccagcgtgtccagcgagccgtgatggcgcacgacggcgcagcgtccgccggggatttcgccgttaatcacgccaaaggcgttttcaccaaccggccgatcgaccgtaccgcagatatcaaaacgaaatgcctcctgcggggtggtctgcggatcgtcccaggcgatcccccaggtatcgctggtggcgacgggcgatagtccgctcgtcttacgccaggcgataaaacgcgcggcggtggcgttgacaaggtccgggctaccgcgatgttgcagtacggctatccgggtggaggggcacgaaataatgttgacgtccatcgacgtttgctcctgtagcgtatgtttcggtacgcgtcgatgccactcggcccagtccggttgttgacggaattgggtcgggctttggtcaaacgcggtacggaaggcacgactgaacgactccgcattctgaaatccggcatcaagggcaatatcgatgactttatcgcgggggttgaacgccaggcgccaacaggcgcgtcgcagacgcaaccactgaatataccggtacaatggaatgccggtataagcgctaaattgccggtgaaaatggtaaggcgaactgtgcgctatcgcgctcagcgtctccaacgacagcggctcatcaagatggcgcgcaatgtacctacagacgcgctggaagcgcccgacatacgccgggctggccttaatatcgttcatcgtctcctcctcgcgacatactctgacagagcgaggatcgcgattcctgaccgatcttgcgcttatccgacggagacttatagcgcgattttacggatctgtttaacgtcgatttctaccgagttccagtccttatcgacttccccctgaatttctactgtgtcctgcgggccgacggtcacgccgttccagcgcttgtggtcgatatcgacattgatcaccccggaagcatcctggaatttatacaggtcatcagagatgcgctcgacgattttaccgcgcagggtcacccaggtgtcatcacgcagcgacttggcgttcgccacggtggtcaccgcgccgctcggcccggtgaagccgccagcctgggtggtagtggtagttgacggtccggtgaatcctccctgcccggcggccagtaccggcatggaaaccaaagcaataatcgcggtcatcgcagcaatttttttcatcttatattctcccttttgtgttggtatggctcctattacgcccgacaaaacttaacgacttcttaagcggaaaaaagaaattttaatgctgtacatcacccgcttcaacgcggtttactgcgcaaagaaacgggatcgtcggagggaaacatgcgcatattactggtggaagatgacaagcttatcggcgacggcatcaaagccgggctgagcaaaatgggctttagcattgactggtttaccgccgggctggagggcaaaaatgccttatacagcgccccctacgacgccgcaatccttgacctcaccctacccggcatcgatggcctcgatattctgcgcgaatggcgcgataaaggccgccatgagccggtgctgatcctcaccgcccgcgatgccctcaaccagcgggtggagggcctgcgcctgggcgccgatgactacctgtgcaaacctttcgccctgattgaggtggcagcgcgcctcgaagcgttgatccgccgcgcgcacggccagagcagcagcgaactgcgccacggcaaggtgatcctcgatccgaaccgcttaaccgccagcctcgacggcgaaagcctggcgctgaagccgaaggagttcgccctgctggaactgcttatgcgcaacgccgggcgcgtattgccgcgtaagcttatcgaggaaaagctctacacctgggacgacgaggtctccagcaacgccgtggaagttcacgtccatcatctgcgccgcaagctcggcagcgactttatccgtaccgtccacggcatcggctataccctgggtgacgcatgaaacgacttgcccgtctgagcctgcgcctgcgcctgacgctgctgtttgccgtactgaccaccgccgcctgggggatggccagcgttatcgcctggcagcagaccagcaaaaagctggataagctgttcgatacccagcagctgctgttcgctcgccgcctgagcgtcatgcatttcgatgaactgcgcgccccgcccgcctcgctcggggaaaagaaaaaggtacgccacgggcacatcgacgacgacgcgctggcgttcgccatcttcacccgcgacggcaaaatggtgcttaatgacggcgagaacggagaggatattcagtggaattcgcagcgcgagggattcagcgatggctatctgcgtgacgacgatgacgagtggcgtttcctgtggttaaccaccgccgacggccgctaccgcatcgccgtcgcaggagtgggattaccggcgcgaaatggcgatggatatcgtgacctcgcagctcaccccgtggatggttgccctgccgctgatgttcgtgctgctcatcgtgctgttaagccgcgagctggcgccattgaaaaatctggcgcgcacgctgcgcctgcgcgcgccggactcggcggattcgctcagcgtggagaagatccccgccgaagttcgcccgctggtcgaagcgctgaatcagctgttccgacgcactcacgacgccatgctgcgcgagcgtcggtttacctctgatgccgcccatgagctacgcagcccgctggcggcgctgaaggtgcagaccgaagtcgcccaactctccctggacgatcccgaagggcgtgagaaagcgttggatcagctccaccaggggatcgatcgcgccacccgactggtggatcagctgctgacgctgtcgcggctggactcgctcgcccaactggatgatgtgcagcaggtcgctatcgccgatctgctgcagtcggcagtgatggagatgtatcacccggcgcagcagtccgggattgagctgcgcctgcatcttaatgccagccatatcgtccgcaccggccagccgctgctgctcagtctgctggtgcgcaatctgctggataacgccgtacgctatagcccgcgcggcagccaggtcgatatcacgctcaacgcccgcgagttccgggtgcgcgataacggcccaggcattagcccgcaggcgctctcgcgcattggcgagcgtttttatcgtccgccggggcaggaggcgccgggcagcggcctgggcttgtcgatcgtccggcgcatcgcctcgctgcacggcatgcaggttgattttgccaacgcgcgcgacggcggcttcgaggcccgcgtgtactggtagcgagattattgctcatttggcaaaagactttgcacattttgctcattttactgccccgcttcgcggggtaagatcgtcggcaaattttcatatatgagggtaaaaaatgagcaacatcctgattatcaatggggcgaaaaagttcgcgcactctaatggtcaactgaacgacaccctgaccgaggtcgcggagagttatctgcgcgacgccgggcacgatgttaaaagcgttcgcgccgaaagcgagtacgacgtaaaagaagaagtacagaatttcctgtgggccgatgtggtgatctggcagatgccgggctggtggatgggcgctccgtggacggtgaaaaaatatatggatgacgtctttaccgaaggccacggctcgctgtacgccagcgatggccgtacccgctccgacgccagcaaaaaatatggctccggcggcctggtgcaggggaaaaaatatatgctttctctgacctggaacgcgccgatggaagccttcaccgacaaagaccagttcttccacggcgtcggcgttgacggcgtttacctgccgttccataaagccaatcagttcctcggcatggaggcattgccaacctttatcgccaacgacgtgattaaaatgcctgatgtcccacggtatatcgcagaatatcgcaagcatctggcggaaatttttggttaactagaggtctagctctacatatttcgagttattcgaacctggagtatgacgagatccacacagaaggagttgagttaaccatgttaacagtgattgcagaaatccgtacccgcccgggccagcaccaccgccaggcggttctcgatcagttcgcgaaaattattccgaccgttttgcaggaggccggctgccacggctatgccccgctggtggatcatgccgccggcgtcagcttccagaccacagcgcccgactctatcgtcatggtcgagcagtgggaaagcgtcgcgcatcttgaagcacacctgcaaaccccgcacatgaaagcctggtcggaagcggtcaaaggcgatgtgctggagaccagcatccgtattctgcagcctggcgtttaagtccgccgactcagtaatgccatgaaaaagggagcctgaggctcccttttacgtctggcgcagcgtacagacttacacttccagatccgccatatcgcccttctcctgcagccagttgcgacgatcttccgaacgctttttggccagcagcatatccattatcgccgtggtctgctgctcgtcctcatcgctgatcaccagctgcaccaggcggcgggtattcgggtcaagggtggtttcgcgcagctgcatcgggttcatctcaccgagccctttaaagcgctggacgtttggcttgcccttcttgcgctttagctgctccagcacgccggttttttcttcttccgtcagtgcgtagtaaacctctttaccgaggtcgatacggtacagcggcggtagcgccacatagacgtgcccctctttcacgagggtacggaaatgtcttacgaacagcgcgcacagcagggtggcaatgtgcagaccatcggagtccgcatccgccagaatacaaattttaccgtagcgcagctggcttaaatcatcgctatccgggtcaataccaatcgccaccgaaatgtcgtgcacttcttgcgaagctaacacttcatcggaagagacttcccaggtattaaggatcttgcccttcagcggcatgatcgcctgatattcgcgatcgcgcgcctgcttggctgagccgcccgccgaatccccctcgacaaggaacagctcggtacggttcagatcctgggcggtacagtccgccagcttacccggcagcgccggaccgctggtcagctttttgcgcaccacttttttggccgcgcgcagacggcgctgggcgctggagatggccatctccgccagcagctccgcggcctgcacgttctgattcagccacaggctgaaggcgtccttcaccacgccggagacgaacgccgcgcactggcgcgacgacagacgctctttggtttgcccggcgaactgcggatcctgcatcttcaccgacagcacgtacgcgcagcgatcccagatatcttccgctgacagcttcacgccgcgcggcaggatattacggtactcgcagaactcacgcatcgcgtcgagcagcccctgacgcagaccgttaacgtgcgttccgccctgcatggtcgggatcaggttcacgtagctctcggtcagcagctcgccgccttccggcagccacagcagcgcccagtccaccgcctccgtctcgccggagaaggcgccgacgaatggtttttccggcagcagcggcaggccgttcaccgcttcgctcaggtaatcgttcaggccatcggcatagcaccagctctgctcgctgttgttcacctggtcgcggaaaacaatttccacgcccgggcacagcaccgctttcgcttttaacaggtgggtcagacgtgaaacggaaaagcgcgggctgtcgaagaagctttcgtccggccagaaatggacgctggtcccggtattgcgtttgccgcaggtgccggtgacgtgcaggtcttccactttttcaccattttcaaaggcgatgctgtagacctgaccgtcgcgacgcacgttgacctccacgcgttttgacagggcgttgaccaccgagatccccaccccgtgcaggccgccggaaaactgatagtttttattggaaaacttaccgcccgcatgcagccggcagaggatcagctcaaccgccggcacgccctcttccgggtggatgtcgaccggcatcccacgaccatcgtcaatgacctccagggactggtcggcatgaaggataacttccacgcgtttggcgtggcctgccagcgcttcatccacactgttatcaataacttcctgaccaagatggttaggacgagtggtgtcggtatacatgcccggacggcggcgcaccggctctagcccggtgagtacctcaatggcatcagcattatatgaagattgcgtcatggtgtgtattcgtaggtcgttcagggccgtttagcgcaggccgagaaattcgataatctgagtgaaatgatcgtcaaagccgacaaatgcgtgattaccgccctcctctaccgtctgccggcaagaggcgtagtaatgaacggcctggcggtaatcaagcacttcatccccggtctgctgcagcagccagagtaaatccggcgcttcgagcgggtcgatttgcatgactttgagatcgtaaatatggcgagactctagcacatattgctgcccggtgtatggattctcattgtggccgagaaaattgtttagtagttcaaacggccgcaccgccgggttaaccaccaccgctggcagcataaagcactgcgaaagccaggtcgcgtagtagccgcccagcgacgatcctacgacccccagcggctcgcctccgtgctccagcacgatggactccaacagctccgccgtttccgccgggtaaggcggcaactccggcaccaccatggtgatctctggatagtgctgcgccagccaggtctttaacgccgtcgccttcgccgagcgcggagagctgttaaagccgtgcagataaaggagcgtcgccatcagtagccttctgaagcaatatccggatgaaacgcggcgccttccaggcggcacacttcggtggtcagcgtcccgtcagggtgaagctccagccagcgccagcccggtgacaccgtatccagagtgaaattggcacagtgcggtttaaactggacgcaggtcgacggcgtcgccatcatgcgccggccattccagtcgagatccagttcctgatgaatatggccgcacaaaagatgcttcacccgcggccaggcgctcaacgcgctgtccagcgcgccggcattgcgcagactatgctgatccagccagctgcagccggccggcagcggatgatggtgcagcaggagtaaggtatagcgctccggcgcctccgccagcttatgttcgagccactccagctggaagtcgctcagctcgccatggggaacgccaaacacctggctgtcgagcagcaggatctgccagcgatcgccgagaaacacgcgcttggcaggggaaatgcccgcctcctgcagggtgctgtacatcgccggctggaaatcatggttgcccggtagccagacgcagggtgcagcaaaactcgcgatgccctcagcaaaatgctgataggccgcggaggagtggtcctgcgccagatcgcctgttgcgacaatcagatcgcatggacgctgtgaggcatgaatggccgacagtacggcctgatagctatcccaggtattgatgcctaacaacgtctcatgcttttcagcaaacaggtgagtatcagtaatttgtaatatcctgactctggcctcaccagccagaggtaggtttaacaggctttccaaatggtgtccttaggtttaacgacgctaacaaaccggaatcgccatcgctccatgtgctaaacagtaacgcagccagtcggccaaaaactggttaatttgatgcttttcgtcgcgttgatgcaactttttattaggataatcatatcgcgctttgaagcgaaagatctgctgactcgaacacacttcggccaccatggcgtcatggtagaggcggacggtcatcgatggcaggctccagtagctcactgcaggcagagtctgctctattgccaccagagtagtgtagcgggtcgattcaactatcgttaaccgatactgcgcgcttcccacctgatagcttaccttctcacccgctgcatccgttcgcggcaacaggcggcgcaactgcgcgaagttggtctcgcacaggcgcatcatctcagggaagtcaggtgtataacgcttcattttgtccactcatttcgtaaattgtgataatgcaattgcagccattgcaaggcgatgacagaggctgcgttgtcgattttcccctcttctacccactggtaagcctgctcccgactcaccacatgcacccgaatatcctcgttttcctcggccaggccgtgaatgccttttgccgtcgatgcatcaacttctcccaccaggatcgataaccgttcgctggtgccgccgggactggccagatagcttaatattggtttcgtccgcccaacttcaagcccggcctcctccagcgcttcccgacgggcaacatcttccaccgtttcacccgcttcaatcatgccggcgaccatctccagcaaccacgggctctcgctggtatcataggcggcgatacggatttgttcgaccagcaccacttcgtcgcgcaccgggtcaaagggtagcaagacggcggcgtgcccgcgctcaaaaatttcacgggtgatttcgccactcatgccgccgttaaacaggcggtggcgaaaacggtataaatcgagcgaaaaaaaaccacgatatagcgtttcgcgtgcaataatttctacatcatttttggagaaggtaattccctgctgcgtgggtttgctcattgtcatgtcctgcgaatctgaaattagggatttccaaaccgtttggctaccgttttacggtccgtatgttagattggtgcaaattaccgccggatggcacgtaacgccaactttttacggcggcagaatcgatacaatcagcggaatttttcttagaattagaccagcgctaaatgcttcacaacaaggaatgcaaatgaagaaattgctccccattcttatcggcctgagcctgaccgggttcagcgccatgagccaggcggaaaacctgcttcaggtttaccagcaggcacgcatcagcaaccccgatctgcgtaaatcggcagccgatcgtgacgccgcgttcgaaaagatcaacgaagcgcgcagtccattactgcctcagcttgggctgggagcggattatacctataacaatggctatcgcgacagcaacggcatcaattcaaacgtcaccagcggctcgctgcagttaacgcaggttctgtttgatatgtcgaaatggcgcgccctgacgctgcaggaaaaaacggcagggattcaggatgtcacgtatcagaccgatcagcaaacactgattctgaataccgcgacggcctattttaaagtgctggccgccatcgacacgctttcctataccgaagcgcagaaacaggctatttaccgccagttggatcaaaccacgcagcgctttaacgtaggcctggtggcgatcaccgacgtgcagaacgcccgttcacaatacgatgccgtgctggcgaacgaagtcaccgcgcgtaacgatctcgacaacgccgtcgaagaactgcgtcaggtcaccggtaattactatccggagctggcctccctgaacgtgaatggcttcaaaaccaacaagccgcaggcggtcaacgccctgctgaaggaagcggagaaccgcaacctgtcgctgctgcaggcgcgtctgaaccaggacctggctcgcgagcagattcgccaggcgcaggacggccatttgccgacgctcagcctatccgcgtcgagtgggatatcgaatactagctacagtggttcaaaaacccataataatcctcagcaataccaggataacgatgccgggcagaaccaaatcggcctgaacttctctctgccactgtatcagggcggcgcggtgacctcgcaggtcaaacaggcgcaatacaacttcgtcggcgccagcgagcagctggaaagcgcccaccgcagcgtcgtgcagactgtgcgttcatcgtttaacaacgtgaacgcctccatcagcagcatcaacgcctacaaacaggcggtggtctctgcgcaaagctccctggatgccatggaagctggctactcggtgggtacgcgtactatcgttgacgtcctcgacgccaccactacgctgtataacgctaagcagcagctctcgaatgcgcgctacaactacctgatcaacgagctgaacattaagtcggcgttaggtaccctgaacgagcaggatctggtcgccctgaacaacacgctgggtaaacccatctccacctccgcagatagcgtcgcgccggaaaatccgcaacaggatgccaccgctgatggctacggcaacactaccgcggcggtgaagccggcgtccgcacggaccacccagagcagcggcagcaatccgttccgtcagtaattctcatactgtgatgcgcatcgcctgtccgtcggacaggcgatgcgttaaacgtaaggcaacgtaaagatcccccgcttagcgcccctcttcgcttcattttccaccactcatcctctatcctgagcgttaacacacgccataccactgggtcctggaagacaaatatgaaacggacaaaaaatattaatcattcgtcgttccgcaaaagctggagcgcacgccatctgacgccggtcgcgctggccgttaccgcggtctttatgctcgccggttgtgaaaaaagcgacgaaacggtgtcgctgtaccagaacgccgatgactgctccgccgccaacccgggcaaagcagccgaatgcaccacggcctacaccaacgcggtaaaagaggcagagcgcactgcgccgaagtatgccacccgcgaagactgcgtcgccgagtttggcgaaggccagtgccagcagacgccagcccaggcgggcgtcgccccggaaaaccaggcgcaggcgcaaagcagcggcagcttctggatgccgctgatggccggctacatgatgggccgcctgatgggcggcggcatggcgcaacagcagccgctgttcagctcgaaaaatccggccagcccggcctacggtcagtacactgacgccagcggcaagagctatggcgccgcccagccgggccgcaccatgaatgtgccgaaaaccgcgatggcgccgaagccagccaccaccaccaccgtcacccgcggcggctttggcgagtcggtagcgaaacagtcgaccatgcagcgtagcgccgcaggctcaacgtcctcttctcgctcaatgggcggctaagcaacatggaaagagtcagtattaccgagcgcccggactggcgcgagaaagcgaccgagtacggtttcaacttccataccatgtacggcgagccctactggagcgaagaggcgtattacaagctgaccctcgcgcaggtggaaaagctggaagcggtcaccgctgagctacatcagatgtgcctccaggtggtggaaaaagtgatcgccagcgatgagctgatgaccaaattccgcatccctaaacacacctggggttttgtacgtcagtcgtggaaaaccaaccagccgtcgctctactcacgtctcgacctggcctgggatggcgtcggcgaaccgaagctgttggagaacaatgccgacaccccgacctcgctgtatgaagcggccttcttccagtggatctggctggaagatcagctcaacgccggcaagctgccggcgggcagcgaccagttcaacagtttgcaggaaaagctgatcgatcgcttcggcgagctgcgcgagcagtttggctttcagctgctgcatatggcctgctgccgcgataccgttgaagatcgcggtaccgtgcagtatctgcaggactgcgccgctgaagcggggctggcgacggaattcctctacgttgaagatatcggcctgggcgaaaaaggccagtttaccgatctgcaggatcaggtgattggcaatctgttcaagctctatccgtgggagtttatgctgcgggagatgttctccaccaagctggaagacgctggcgtccgctggctggagccggcgtggaaaagcattatctccaacaaggcgctgctgccaatgctgtgggagatgttccccaatcaccctaatctgctggcggcctacttcagcgaagatactcacccggagatggagaagtacgtcattaagccaatcttctcccgcgaaggcgctaacgtgtcgatcgttgaaaatggcaaagtggtggaggcagtagaaggcccgtacggggaagaaggcaccatcgtgcaggcgttttacccgctgccgaagtttggcgatagctatacgctgattggcagctggctcatcaacgaccagcctgcagggatcggtattcgcgaagaccgggcgctgatcacccaggatctgtcgcgcttctatccgcacattttcgtcgaataatgccgcgctccggcgacggtaaatgccgccggagcgcgctatcatcaggcgccaaccaacaccgacagcatgctcagcgagcccatctcgatgccatcgaccgggatcgtcatcgcctcaacgccatcccacgtccccaggacatacagcagcggcaggaaatgctccgccgtcgggttggagagcgagcccccttcgtgtgccaggtagttaaccagcgggtgctgctcgtccagcccctgccattgcagattcgccttcacgtagttattgaaggactctgcccaagggtacggcgtgttctcgccatgccagcgggcggtgcgcaggttatgcaccacgttgccgctggccaccagcataatgccttcatcacgcagcgaggccagcttccgccccatttcgagatgccaggccggcggtttggtgctgtcgatgctcaactgaaccatcgggatatccgcctgcggatacattttaatcagcacgccccacgagccatggtcaaatccccaggcttctgtatcgagggtgaccggcaccggcgagagcagctccaccagccgttgcgccagcgccggagagcccggcgccggataatgcgtgtcatacagcgcctgcggaaaaccgccgaagtcatgaatggtcttcggcgcctccatcgccgttacgcccgtaccgcgcgtaaaccagtgcgcagagaccaccacgatcgctttcggacgcggcagggtttcgcccagttgagcccaggcgcgggtataacggttgtcttccagcacgttcattgggctgccatggccgagaaacaacgcgggcattcgggtacgggacatgatgatatccttagggtgtcaatgtgatgtgctcacattacgcgcttttgcgccaggataaactcagataaccatgatgatgatcgtcagaaaatttgaatgtaattcgcggtaaagggacgtgtcccgtacgcgcatcctcaggcaatatactcgtatgtaattattttcacagggagagaagcgatgtcatcacccttaatattgacgctgttagccggtagcgcaaccttcattggcgccatattcggcgtgattggccagaaaccctctaaccgcctgcttggcttctccctcggctttgccgccgggattatgctattgatttcgttgatggaaatgctgcctgccgcgctggccgccgagggcatgtcgccgctgctcggctatggaatgtttgttgtcggcctgctgggctactttggccttgaccgcctgctgccgcacgcccacccgcaggatctgatgactcccgccatgccgcgcccgcgcaacttacgccgcaccgctattcttttgacgctggggatcagcctgcataactttccggaagggatcgccacctatgtcacggccagcaacaacctcgagcttggcatgggcgtcgcccttgccgtcgccctgcacaatattccggaaggactggcggttgccggaccggtgtatgccgccaccggctcgcgcagcaaagcggtgctctgggccgggctttccggcatggcggaaattttgggcggcgtgctggcgtggttgattctggggagcctggtctcgccgctggtgatgggcgcgatcatggctgccgtcgccgggattatggtggcgctgtcggtcgatgaactgatgccgctggcgaaagagatcgatccgcaaagcaatccaagctacggcgtcctgtgcgggatgtcggtcatggggctgagcctggtggtactccagacgatgggcatcggttaaagcgcagaaacaacacagcccactaacaagtgggctgtgctcgggcgtagcgaaccgctatttagctggctttacgctcatgttcgcgacgataggccaccagatcttcaatcgtgactaccgccatattgtgctgctgagcgaacttgatgcactccggcgcgcgggccatggtgccatcgtcattggtcaactcgcacagcacgcctgccggtttaaagccagccagggtcacgaggtcgatagtggcttcggtgtggccgccgcgggtcagtacgccgcccggctgcgcacgcagcgggaagacgtgaccaggacggttgagatcggaaggtttcgcgccgtcggcgatggccgcgcggacggtggtcacgcggtcggcagcggagacgccggtggtcacaccttcggccgcttcgatggtcacggtgaagccagtgccgtaggcgctggtgttgttctctaccatcatcggcagatccagctgtttgcggcgttcttcggtcaggcacaggcacacaatgccgctgccgtgacgaatggtcagcgccatctgctcaacggtcatggtttcggcggcgaagatcatatcgccttcgttttcacggtcttcatcatcaagcaccatcacgccgcggccttcgcgcagggcgtccaaagcgtgttccacacgttcaaaagcggtaccaaaagaagaaaggagcgtctgattcatggtaaaaaaacctcattaaaattatggttaccagaatcagggcagtcttaggagcgccggtttagcggcaaaagtcaacgcgagcgggcctgggcccgactgtgccgttactctctcccatccggactttaaccgtcggccccggaattacaccggatctgctgaccttcccgtagtcacgggaagcgctcgcgggctttcaacgccatggttgatttaccgccggtggggaatttcgccccgccctgagaataagcgagataactataacgctattgactatcctcggcaatgcataagcttcaaacatttctggtttataggcggcctggttcgcactacaatgatcaatcatccgacccgagcaggaaaccaccatgattgacccgaaaaaaattgaacaaatcgcccgccaggtccatgagtcgatgccaaaaggacttcgcgatctgggtgaggatgttgagaagaaaatccgccaggcgctgcagtcgcagctgacccgtctggatctggttagccgcgaagagtttgacgtgcagactcaggtgctgctgcggacccgggaaaaactggcgctgctggagcagcgcctgaatgacctcgaaaaccgcccggcggcgacgccgggcagcgaagagcagcagtaaaaaacgggcccctgggggcccgttttgcgtttggcttaatgggcggcttccgcctgactactcacctggcgacagtacagttcatagcgctggcaaaaccattcacgatgttcttcatccatattgccgacaatggcctgaagatcaactggctggccctgggcgtgcattctggcgaaactccgcgccaaaaaatcaaaattcttcattgaatacatatcgttatggttcatgcgcatactccttcagcggtggatgttctgatcagtcatatgccttttactcacttcagtatttacgcttaccttaacgcgatttgtacgaaaaatgcgcttaacatgattatttattgcgctaaatcattttccacatgattaaataaaaacggcccgcgatacgtctatcgcaggccgtgatgcttcaccgtacacaccggtgaatagcgaaaagcttatttgtcgctatctttttgtattttcttaataatattggtagttgagcagccatcttcaaagttgagcaccaacacttcgccaccgttcgcccagacctcttcgctgccggcgatctgctccggtttgtagtcgccgcccttgaccagcagatccggcaggatgccagcgatcaggcgctgcggagtatcttcttcaaatgataccacccagtcgaccgcttccagcgcccccagcacgatcatccgctgttccagcgggttcaccgggcgggtttcgcctttcagacgtttggtggaggcatcgctgttgaccgccacgatcagacggtcgcccagcttgcgcgcattcgccagataggagacatgaccggcatgcagaatgtcgaagacgccgttggtcatcaccactttctcgccgcgtttgcgcgccgccgcaaccgcctgtttgagttcctcttcgctcatcacgccaaagccggtctcagcccggccgcggaccgcgttttccagctcgacaggggaaacggtggatgtacccagcttaccgaccaccacgcccgccgcggcgttagcgaaatagcaggcctcttccagggtgttgccggacgccagggtcgccgccagcacgccaatcaccgtgtcgccggcgccggtcacgtcgtacacttcctgggcctgggtcggcatatgcagcggcggacgccccggctgcagcagcgtcatcccctgctcagagcgcgtcaccagcagcgccgacagttcgaattcggcgatgagcttcatgccgcgctcaacgatctgcgcttcatcctggcacttgcccaccaccgcttcaaactcagagaggttcggggtgagcaacgtcgcgccgcgatagcgttcgaaatcggtgcctttcggatcgatcagcaccggcacgcccgcttcgcgtgcgagtcggatcatggtctggacgctggtcagcgcccctttggcatagtccgaaaggaccagcgcgccaatagagcccagcgcctgctgaatgcgctcgtgcatcggctgcggatcgacgccggagaagccctcttcaaagtcgaggcggatcagctgttgattgcgcgacagcacccgcagcttggtgatagtcgggtgagtcgggacggagacgaagtcgcacttcacattgacgttggccagcgcctggctcagcgcgcgggcggcgtcatcaatcccggtcaatcccaccaggcgcgaggttgcccccagcgaggcaatgttcatcgctacgtttgccgcgccgccaggacgttcttcgatattttccaccttcaccaccggcaccggggcttccggggaaatacgactggtggggccgtaccagtagcggtccagcatcacatcacccaccaccaacactcctgcacgttcaaactccggcagcgttactttcatgactctctcctgcgagacgcaaactttgcgcgcgataatagcacacccgattttatagttaagccatcagccatttctgccagctggcgctgacctgctcgcgctcccggctgaaggcctctggcgccacgtgtcccggcagctcctgcagggccaggtgatggagcgcgtcacgcaaggtggtgtacgcgtgcgttaaggcgcgcgcttcctcctcgtccatgatgtcgttctgcgccagcagctcgagaatacgcacattatcagaccagcgggtcagcttcggcttgtcgctggcatagcgtaggaccagatactgggtaataaattcaatatccgtgatcccgccggcatcggctttgatatcaaaacgattgggatgcttgttgccgaggtgggcgcgcatcttctcgcgcatctcgcgaacctcggtctgcagggttgcgccctcccgcggggtggtcaggatatcgcgacgaatggcgtcaaagcgcgcctgcaacgccgggtcgccatagaccacgcgggcgcgcaccagcgcctgatgctcccacgtccaggcctcgttctgctgatagtcggcaaacgcgtcagcggtggtaaccagcatccccgccgcgccggaagggcgcagccgggcgtccacttcgtagagaataccggacgaggtgcgggtgctgaacagatgcatgatccgctgggccagccgcaggtagaactgacggccgtcaatctcccgctcgccgtcggtcatcacctccgccggacagtcatggaggaacaccaggtcgagatctgagctgtagcccagctcccaaccgccgagcttgccgtagccgacgacggcgaagccgcgcccctggcgatcgtgcagatgggtcggcaggccgtagcgagccaccatctgcccccatgcctgctgcaccaccgcatcgaggatcgcttcggcaagccaggttaaatggtcgctgaccttcatcaccggtagggtgccggcgatatccgccgccgcgatatgtagctgctgcgcctgcttgaactggcgcaacgcctccagctgctgctcttcatcctcttccggcacccgcagcagatactgacgcagctcgtcgcgataggcatcggtcgccgtcggctgatagagggtgttgggatccagcagctcatccagcagcagcgggtggcgcgccagctggctggcgaccatcggcgatgccgcgcagagcgtaatcaggtgtttcagcgcgccggggaattcgctcagcagttcaagataggtggtgcgggtgacgatgccggtcaacagcggcgtgatccgcgccagaggcagcggcgcatcggcgcgcgagcagatttcgctcaacagatgcggcatcagctgatccagcacctggcggccgcgcgggccgatggtgcgccgatccagctctttgcggaaatcggcaatcagcgccagcacgctgcggcggtcggcgtcgtttaaatgcgccagcgccggactggcgtcatcttcttccagcgcatcctgccacagctcgcgccagtactcggccagctgctcatctggcgactgagcctcgtcatcgccgatcagttcattaaacacccgccgtacgttggccatatggttcgccagctgcgcgctcagcgtctcccagtcatcggtatgcatcccccacgccagtctggcgcggttcagttcatcctgcggcagggtctgggtctgttcatcgttgatactttgcagcaggttttccagccggcgcaggaacagataggccgcgcgcagcagcgtcgcgtcgccttccggcagcagatgcagctcatcaatcgccgccagtgtcggcaatagcgcgcgctgctgcagcgcaggttcgcgaccgccgcggatcagctgaaagacctgaacgataaattcaatttcacgaatgccgccggcgccgagcttgatgttgtctttcagcccgcgacgccgcacttcacgggcgatcatgcctttcatgttacgcagcgactggatcacgctgaagtcgatatagcggcggaagacgaaggggcgaagcatcgcgcgcagttcgctggcgtaggcgccgtcgttatcgcccatgatccgcgctttcaccatcgcgtagcgttcccagtcccgcccctgctcctggtaataatcttccagcgccgcaaagctgagcaccagcggcccgctgtcgccaaacggccgcaggcgcatgtccacccgataaacaaagccgtcctgcgtcggctggtcgagcgccttgataagccgctgccccaggcgggtaaagaactgggcgttatccagctcgcggcggccgccgcgggtggcgccatgctccggccaggcaaagatcagatcgatatcggaagagaagttcagctcgccgccgcccagctttcccatcccgaggatcagcagcggctgcggctgaccctcggcgttgcatggcgttccccactctttacagcaggcggcgtacagccagtcgcgggcggcgacaatcagggtctccgccaggacgctcagctgctgcagcgtctcttcttcgcgcaccagcgacaacgcctgcgcccaggcgatgcggaccatcatctggcggcggaagagacgcagctctcgcatcaaccccgcttcgtcagtgacggcctgcaggcgctcctgcagccaggcttcgtaatgccgccactcttccgccgccggcgcggagtccgcaagctcattcagccagcccggctgagcgatcacactctgttcgacaaaatcgctgaacgccatcaccgacctggcctgtgggctcagttcggcaacgggaaaatccgctggcagacggtcagcgaccgtctgccagtgctgctgtaactgcggagaaagcggcatcataagggctccctggcctgtaattatcgttttccactatgcagccagaacggctcggcagccagcgcctggcgacggaaatattcaaacacgctgcggtcgtcatgctctatcgcacgctgaagttcctgccagttctccagccacggcgcgacggcgtcgccataggcgcccgccagcagctggacgctgtcgatgtcgcgggacagcttcggcaactggtcagcggcatcttctaccgccagatgctgcacggcgctgcgcagctcggccgccacccgcgagaggtgaatatcggcaaaccgtttgaacgagccggctatttttttctctcccgcctcgttgaggaacggacgccacccgcgctggaccagccattcggtcagggccagtttggcgccaacgacctcggtgcggaataacgcttcgtcggcggtgtccgcagccagcagaacggcgtcggcgtcgttcagcaacgcgcggaggtgggtggtcgccttacgcggcacgatgccgccaaacagcacgagggcatggcgcacgcgggctatcgccagcagaatttccgctttggcttttgcgttgccgcgcagccagatctcgtcgtgatatagccagtgcgccagggcgctctccagcgccgcctccagcccctgctccacgctggccttcgctgccaccggcagcaccgccagccgggtcaccggacgctcattgttaccttgcgccagatgatacccgcgcgcggctttgctcaggctcccctgacgcaggacgccgctctccagcaaacgatgcgcgaggcgtagcagatcggcggtctccccggcgagcagctccagctccagttcgcagatcggctcctgatgttcgcccgcctttacttcgccgcgatcgagggcaatctcaatctcactctttccttcctggatcacccagcgttcacgggcaaaatcggtgctgaacagcggctggacatgctccgccagcgcggccggaagttccccttgcggccagacctccgccggcaggcgctcaagcgccagctccggtttagccaatggaatattatattccgggcgctggtgcaggccgccgaccacccgaccggcgattttcagcgtcatctcataacgcccctgatcgccgcggatgcgcagccccatatcgtgacgacgcagccagttatcggcggtttcgtaataaatgttcagcaactggcccgcgggcgtatgtttcgcctcgagcgcattgagctgctcgcgcagcgtctctaccccatcctgagcgacgataaacttgagttcgatttcttgagccatgactgaattcttccgcttctgtgctgcgccgacaaattgcggcgaacttacgacaatattttttgtcagtagatagtattttgcggtgaatcgccatgcaacgcgctttttgccgggccacctcctggatgattccgattgtggcggaaaactttgcgtcgctctggcgatgcctctactatcgttccactttttatgaccaaacgatgacctgatgccaaaattacgcctgattacttttactttgctcgcgcttagcgccgccacggcggttcacgcagaagaaaagcgctacgtttccgatgagctgaacacctgggttcgcagcggcccgggcgataattatcgtctggtcggcaccatcaacgccggggaagaagtgtcggtactgcaaacgaacgacagcaccagttacgcgcaaattcgcgacagcaacggccgtaccgcctggatcccgctgaaagagctgagcaacgagcccagcctgcgcacccgcgtcccggatctggaaaaccaggtcaaaacgctgaccgataagctgaataacatcgatgccacctggaaccagcgcacggcggatatgcagaagaaagtcgccggcagcgacagcgtgattaacgcgctgaaggacgagaaccaaaagttgaaaaacgagctggttgtcgcgcagaagaaggtgaatgcggcaaatctgcagcttgatgataaacagcgcaccattatcatgcagtggtttatgtacggcggcggtgtgctgggcgtcggtctgctgctcggtctggtgctgccgcatctggtgccaagccgcaaacgcaaagaccggtggatgaactaattcgtcttctctgccagacttacgtatcatcttgcgaaaaacggatacgggagaatcaggcgtgaagagttatctggtcggtggcgcggtgcgtgacgcgctgttagggctgccggtcaaagaccgagactgggtggtggtgggcgccaccccgcaacagatgctagacgcgggctatcaacaggtaggccgcgattttcccgtgttcctccatccgcaaagccgggaagagtatgccctggcccgcaccgagcgcaaatccggcgcgggctataccggttttacctgctatgccgccccggacgtcaccctcgaagccgatctgctgcgccgcgacctgacggtcaatgccctcgcccaggatgccgacggcgcaattatcgacccctacggcggacagaacgatctccgtaagcgcctgctgcgccatgtctctcccgcgtttagtgaagatccgctgcgcgtgctgcgcgtcgcgcgctttgccgcccgctacgcccacctcggttttcgcattgccgaagagacccaggccctgatggccgcgatagttgaggccggcgagctggcgcatttaacgccggagcgggtgtggaaagagacggaaagcgcattaactactcgcaacccgcaggtctttttccagacgctgcgcgactgtcaggccctcaaggtgctgttcccggagattgacgccctgtacggcgtgccggccccggcgaaatggcatccggaaatcgataccggcctgcacaccctgatgaccgtcacgatggccgcgatgctgtcgccggatgtcgacgtacgtttcgccaccctgtgccatgacctcggcaaagggctgacgccgaaggcgctctggccgcgtcaccacggccatggtccagcgggagtcaagctggtggagcagctctgcgcgcgtctgcgggtgccgaacgatatccgcgatctcgcgaaactggtggcggagtaccatgacctaatccacaccctgccgattctgcagccgaaaaccctcgtcaaactcttcgacagcattgacgcgtggcgcaaaccgcagcgcgtgcagcagatcgcgctcaccagcgaagccgacgtccgcggacgcaccggtttcgaggccagcgattacccgcaggggcgcctgctgctggaggcctgggaagtggcgcagtcggtctccactaaagaggtcgtggcggcgggctttaaaggggcggaaattcgcgaggagctgacgcggcggagaattgcggcggtagcgcagtggaaggaacagcgttgcccccagccgcaaggctgagggcgcaggccttagaagaagaccacgtacaccgctgccgcgacgataaagcggtagatagcgaacggaatgaacgagatccgtttgatcagctgcaggaaggttttaatcgcaatcagcgccacgataaacgccatcacgaagccgacggcgaacatcgggacatcgcccatgttcaggaagccgatgctcttgtagacgtccagcacggtggcgcccatcatcatcggtaccgccagcaggaaagagaactccgaggccgcatagcggctgacgcccatcagcatgccgccggagatagtcgcccccgagcgggagaaacctggccacagcgccaggcactgaaagcagccgatgacgaacgcctgacggtaggtcatatcgtcaatcccgaccgcgcgcggctgtttcggcttcagcacttccgctgcaatcagcaatacgccgccgacaatcagggcgtacatcacgttcaccgggttaaacaaggatttaatggtgtcatggaaaatcagccccatcaccaccgcggggatcatgccgagaaggatatggataagcgacaaacggccgctgccctggccttcatgcgccggcggtttcccgaaatggatgccgatcaggccgaacaggcgacgccagaacatcaccaccacggcgagtatcgaacctaactgaatcaccacttcaaaggtatttgcggtatcaccttcaaaccccagcaggtgaccaacaataatcatatgaccggtactggaaacaggtaaaaactctgtcaaaccctcaaccacacccaatattgccgccaccagcagcgagtgtatatcgctcatccaattaaaccctttaaaaaagtaaaatgaaaaaaaccaggaacacggtatcgttcaacaggcacaacccggctgccagagcgcgcgtaatccgcagcgtacagtaagtacacacggattcgtccaccgttctggaaggacatcgccagtaaaattgcctgatgaccggatgctatgaccggtataaacgcaatttgtttaacaagtatgacctgaaaagttttgtttcagattaaggccacgttcaataatcaccccgacgtttgccgcgcgagccacggcgccaggtttgctgacttttatgcgcacccatggcgactggaatgtttccagcagcaggtcggccacctcttccgccacccgctccactaacgcaaatttccccccctccacatgcgcgatcacgcgctcgctgatatcagcatagctgaggcaatcgctgacatcatcgctggcggccgccttgcggttatcccatgcaatttcgatatcgaacaccagcttctgctcaatggtttgttcccagtcataaacaccgatggtggtgattaccgaaagttgctctataaatacaatatccatcacgccctgcctgctttttagctaaaccggataccacttccggcgaattatgcgtattatccacagatgcagagaatacaacgacattttcaaaacggaacagcgttatgagtgcaatcgcgcctggactggtactcctcgcctacctctgcggctccatttccagcgccattctggtatgtcgccttgctggcctgcccgacccacgcgacagcggctcaggcaaccccggggccactaacgtactacgaattggcggaaaaggggcggccgtagcggtacttatttttgatgtgctgaagggcatgctcccggtgtggggcgcctgggcgctgggccttacgccgttctggctggggttagtggcgattgccgcctgcgtgggccatatctggccagtcttctttcatttccgcggcggtaaaggcgtcgccacggccttcggcgctatcgcccccatcgggctcgatctcaccggggtgatggccgggacctggctgctgaccatcctgctcagcggttactcttccctgggcgctatcgtcagcgcgctgatcgccccgttctacgtctggtggttcaaaccgcagtacacctttccggtgtcgatgctctcctgcctgatcctcctgcgccatcacgacaacattcagcgtctgtggcgccgccaggagagcaaaatctggacccgcgagaagaagaaaaaaacgccagagcagaagtaatctcccctcccggctccgccagccggggaactcccctgcgctaatcgcgcctttcatccgcccttttacgcttcctcgccatcaaaggcgatcatcgccacatcctccttttgtaacaatacgttagcagcatggaaaggcaaaagttgcgctggcggctggcggcgcggcgcaacccgatccgccgccttttccgccgcgcccaggctgcggatcaggatattgacggcaaagattatccgggtgaataatccggagcggttatgccgctttcccctcgcgcccgtcgcgacgctccgggttacggatgacataagcgtttcgtatgaccgggataaactcccgccgatcaatactcattgctgctgttttatcttgattttgcaggggcgcaacattgcacggcaccgtgttaccaccactcaaaaaaggctggcaggccacgctggatctccgctttcaccaggccggcggcaagaccgttctcgccagcgcccaacacgtcggcccgctgaccgtccagcgcccgttttacccggaagaagagacctgtcacctctatctgcttcacccgcccggcggcatcgtcggcggtgatgagctgacaattagcgcgcaccttgcccccggctgccatacgctgataaccatgcctggcgccagcaagttttaccgcagcagcggcgcgcaagcgctagttcgccagcagttgacccttgccccacaggcaaccctggagtggctcccgcaggatgccatcttctttcccggggcgaatgcccggctgttcactacctttcatctttgcgcctccagcaggctgctggcctgggatctgctctgccttggccgcccggtgattggcgaaaccttcagccacggcaccctcagcaaccggctggaggtatgggtggacgatgagccgctgctggtcgagcgcctgcagctgcaggagggagagctctccagcgtcgccgaacgtccctgggtcggcactttgctgtgctatccggctaccgatgccctgctcgacggggtgcgcgacgcgctggcgccgctcggtctctacgccggcgccagcctgaccgaccgcctgctgacggtgcgtttcctcagtgacgataatctgatttgccagcgggtgatgcgcgacgtatggcagtttctgcgccctcatctcaccggtaaatctcccgtacttccccgaatctggctgacttaagagaacgttatggaactgaccccccgagaaaaagacaagctgttgctgtttaccgccgcgctggtggcggagcgtcgcctggcccgcggcctgaagctcaactatccggagtccgtggccctcatcagcgcctttattatggaaggcgctcgggacggcaaaagcgtggcctcgctgatggaggaaggccgtcacgtcctgacccgcgagcaggtgatggagggcgtcccggaaatgatcccggatatccaggtcgaagccaccttcccggacggctcgaagctggtcaccgttcacaacccgattatctgaggtagcgccatgatccccggtgaatatcacgttaagcccggtcagatagccctgaataccggccgggcaacctgtcgcgtggtcgttgagaaccacggcgatcggccgattcaggtcggttcgcactaccatttcgccgaggttaacccggcgctgaagttcgaccgtcagcaggccgccggctatcgcctgaatatcccggcgggcacggcggtacgctttgaacccggccagaaacgcgaggtcgagctggtggccttcgccggtcaccgcgccgtcttcggcttccgcggcgaggttatgggccctctggaggtaaacgatgagtaatatttcacgccaggcctatgccgatatgttcggcccaaccgtcggcgacaaggtgcgcctggcggataccgagctgtggatcgaggtggaggacgatttgaccacctacggggaagaggtcaaattcggcggcggcaaagtgatccgcgacggcatgggccagggacagatgctggccgccgactgtgtcgacctggtgctcaccaacgcgttgatcgtcgatcactgggggatcgttaaggccgatatcggcgtgaaggacggccggatcttcgccatcggcaaagccggcaaccccgacatccagcccaacgtcaccatccccatcggcgccgcgacggaagtgatcgccgccgaaggaaaaattgtcaccgccggcgggatcgatacccatattcactggatctgtccgcaacaggcggaagaggcgctggtctccggcgtgaccaccatggtcggcggcggcaccggcccggccgcgggcacccatgccaccacctgcaccccgggcccgtggtatatctcacgcatgctgcaggcggccgacagcctgccggtcaatatcggcctgctgggcaagggcaacgtttctcagccggatgccctgcgcgagcaggtggcggcgggcgttattggcctgaagatccatgaggactggggcgccaccccggcggcgatcgactgtgcgttaaccgtcgccgatgaaatggacatccaggtcgccctgcacagcgacaccctgaatgaatccggatttgtggaagacaccctcgccgccatcggcgggcgcaccatccacaccttccataccgaaggagccggcggcggccatgcgccggacatcatcaccgcctgcgcccacccgaacattttgccgtcgtccaccaatccaacgctgccctacaccctcaacaccatcgatgaacatctcgatatgctgatggtctgccaccatctggacccggacatcgccgaggacgtggcctttgccgagtcgcgcattcgccgggaaaccatcgctgcggaagacgtgctgcacgatctcggcgccttctcgctcacctcctccgattcgcaggccatgggccgcgtcggagaagtgattctccgcacctggcaggtggcgcatcgcatgaaggtgcagcgcggagcgctggcggaggagaccggggataacgacaacttccgcgtgaagcgctacatcgccaaatacaccatcaacccggcgctgacccacggcatcgcacacgaagtcggatccattgaggtgggtaagctggctgacctcgtggtctggtcaccagccttcttcggcgtgaaaccggccaccgtgatcaaaggcggcatgatcgccatcgcgccgatgggcgatatcaatgcctctattccgaccccgcagccggtgcactaccgcccgatgtttggcgcgctgggcagcgcccgccatcactgccgcctcaccttcctgtcgcaggcggcggcagccaatggcgttgccgagcggctgaacctgcgcagcgcgatcgccgtggtgaaaggctgccgtacggtgcagaaagccgacatggtgcacaacagcctgcagcctaacatcaccgtcgacgcccagacctatgaggtgcgggtggatggcgaacttatcaccagcgagccggcagacgttctgccgatggcgcaacgatattttctgttttaaggagagcggatgctttatttaactcaacgtctggagatccccagcgccgcgaccgccagcgttacgctgccgattgatgttcgcgtcaaaagccgggttaaggtcaccctcaacgatggccgggaagccggcctgctgctgccccgcggcctgctgctgcgcggcggcgatgtgctcagcaacgaagaaggcaccgagtttgtgcaggtgattgccgctgatgaaggggtgtcggtagtgcgctgcgacgatccgtttatgctggcgaaggcctgctaccacctcggcaaccgtcacgtgccgctgcagatcatgcctggcgagctgcgctaccatcacgatcacgtgctggacgatatgctgcgccagttcggcctgacggtgacctttggccagctgccgttcgagccggaagccggcgcttacgccagcgagagccacggtcatcatcatgctcatcatgaccaccacgctcacagccactagcatgtcgacagcggaacaacgcctgcggctgatgcagctggccagcagcaacctgccggtagggggttacagctggtcccaggggctggagtgggctgtggaagccggctgggtgccggacgtcgcggccttcgagcgctggcagcgacgccagatgacggaaggcttttttaccgttgacctgccgctgttcgcccgcctgtaccgcgcctgcgaacaaggcgatatcgctgcggcccagcgctggaccgcctatctgctggcctgccgggaaactcgtgaactgcgggaggaagagcgcaaccgcggcgcggcgtttgcccgtctgctgagcgactggcagccggactgtccgccgccgtggcgctccctgtgccagcaaagccagctcgccgggatggcctggctcggcgtgcgctggcgtatcgccctgcccgagatggccctcagcctgggctatagctggattgagagcgccgtgatggccggcgtcaagctggtccccttcggccagcaggccgcccagcagctgattttacgtctttgtgaccactacgcggccgagatgccccgcgcgctggccacgccggacggcgatatcggatcggccaccccgctcgccgccatcgcctctgcccggcatgaaacccaatactctcgattattccgttcctaggagaagccatgaactcttataaacacccgctgcgcgtcggcgtcggcggcccggtcggctccggtaaaaccgctctgctggaagcactgtgtaaagcgatgcgcgatacctggcagctggcggtggtcactaacgacatctataccaaagaagatcagcgcatcctcaccgaagcgggcgcgctggcgcctgaacgcatcgtcggtgtggaaaccggcggctgcccgcatacggcgatccgcgaagatgcctcaatgaacctcgccgccgtggaagcgctgagtgaaaagttcggtaacctcgaccttatcttcgtggaaagcggcggcgataacctgagcgccaccttcagcccagagctggcggatctgaccatctacgtcatcgatgtggccgaaggggagaagatcccgcgcaaaggcggaccggggatcaccaaatccgatttcctggtgatcaataaaaccgaccttgccccctatgtgggcgcgtcgctggaggtgatggcgagcgatacccagcgtatgcgcggcgatcgcccatggaccttcaccaatctgaagcagggcgacggcctgagcaccattatcgccttcctcgaagacaaaggcatgcttggcaaataggcctgttgcaccagccgggcgcaagcgcgtccggatggtgcagcctctgctctctctttatatcatcctgcctccacctccgcgccacgcctgccctgcaatatggcataaggtttgctaattcaagtcatgcctaaccattaaggaatgactatgtcatcactggatcttaaccctgaattacccgcgacaacgcggacttccggctcccgggaaaccttagaagattacaccttacgttacgccccgctgagctttcgccgctggggtccgggcgtcgtcgcggtcaccgcgctgggcggcatcgcctatctggccgacttttccatcggcgccagcatcggtatggcctggggcaccagcaacgccatctattcgatcctggtggcggcgctggtgatcttcctcaccggcattccgctggcgatcactgccgcgcgctacaacattgaccttgacctgatcacccgcagcgccggcttcggctatttcggctcggtgatcaccagcattatttttgccggcttcacctttatcttcttcgccctcgaaggctcgatcatggcccagggcctgctggtgggcctcgggatcccgctgtggatgggatatctgatcgccaccctgatggtgctcccgctggtggtctatggcatgaaagccctgacccgcctgcaggtgtggaccacgccgctgtggctggtgctgatggtggtgccggtggtgtggctgattgtcaaagatccgcagctggtggacggcttcctgcatttcgccggtaaaaacagcgcgtcgacggtggatattaccgccatcatgctcggcgccggggtatgcctgtcgctgatcatgcagattggcgagcaaattgattacctgcgctttatgccgcctaagaccgcggagaatcgtaaaagctggtggctggcggtcttttccgccggcccgggctgggtggtgttaggggcgatcaaacagatcatcggcgccttcctcggcttctatctgttgacccgtttcccggcggtgcacaataccgaaccggtgcagcagttcgtcagcgtcttcgataacctggtgcccggctggctggccctgacgctggcggtggtgctggtggtgatctcgcagatcaaaattaacgtcaccaatgcctactccggctcgctggcgtggaccagcgcctggacccgcaccaccaaacgctatccgggacggattatttttgtggtggtcaacctggcgattgccctggcgctgatggagggcgatatgttcagcgccctgtcgtggatcctcggcttttactccaacttcgccatcgcctgggtcgtggtggtggcgaccgacatcacctttaataaaggcttgctcaagctggcgccggcgcagccggagtatcgtcgcggcatgatctacaacgttaacccggtgggcgtggtctcctttggtctggccgccgggctgtcgatctgcgccttcttcggtctgctgggggcgacgctggcgccgttctcgccgctgattgcgctggtcgttgcctttgtcatgaccccgctgatggggctccttacccgcgggcgctactatattaagcaggtggatgacggcatcgccgagccgcgctatgacgcggcggggaacgcctccaccaccgtgtatcaatgcgttagctgtgaggaagagtacgagcgcccggacgtgatgcactcgcacaagcatcagggagccatctgctcgctgtgtaaaagtatggagtagtcaggaaggcaggccgacgtgacgtcggcctgtttcaggacgcgttaggcggcaggcagctcggccagcggccagcgcgggcgaaccgtcacgccgagctcggctttggcgccggtttgcagacgcaccatgccggcgtaggcgatcatcgcgccgttgtcagtacagaactcagggcgagcgtagaacacctcgccgccgcgtttttgcatcatctccgccagcttcgcccgcagggtacggttggcgctcacgcctcccgccatcaccagacgcttaaagccggtttgctccagcgcgcggcgacatttaatcatcagcgtatcgacgaccgcatcctcaaacgcccgggcgatgtcggcgcgggtttgctcatcgtcgccgttgctgcgaatggtgttggcggcgaaggtcttcaggccggagaagctgaagtccagccccggacggtcggtcatcggccgcgggaagacaaagcggccttcggtgccctgggacgccattttcgacagcatcggcccgccgggataatccaatcccagcagcttcgccgtcttatcaaaggcttcgcccgccgcatcgtcaatcgactcgcccagcagttcatactgaccaataccggtgacgctaatcaactgggtgtggccgccggaaaccagcagcgcgacgaacgggaacgccggcggattatcttccagcatcggcgccagcagatgcccttccatatggtgtaccgggatcgccggcacgttccaggcgaaggccagcgcccggccaacggtcgccccgaccagcagcgcgccgaccaggcctggacccgccgtataggcgacggcgtcgatatctttcgccgtcagaccggcttctttcagcgccgcctggatcagcggcaccgttttgcgcacgtggtcgcgcgatgccagctccggcaccacgccgccgtaatccgcatgcagtttcacctgactatacaattggttggctaacagaccttgctggtcgtcataaatcgcgatgccggtttcatcgcaggatgtttcaatgcccagtacacgcatgagttgttttacctcgcttcaataccgcgcagtgtaggtccaatgaccggcgatgtaaaactttgctcacccctggtgctctcttcgtgtatactcctcacccttataaaagtccctttcaaaaaaggcgccggtgctttacaaagcagcagtagttgcagtaaaattccgcaccattttgaaataagctggcattgcggccagcggcaaaccgaattaatcaaaggtgagaggcacatgccggtaattaaagtacgtgaaaacgagccgttcgacgtagctctgcgtcgcttcaagcgttcctgcgaaaaagcaggtgttctggcggaagttcgtcgtcgtgagttctatgaaaaaccgactaccgaacgtaagcgcgctaaagcttctgcagtgaaacgtcacgcgaagaaactggctcgcgaaaacgcacgccgtactcgtctgtactaatctgttgagagcgacgctctcaattcagaccgagttgtagttgtaaggccgtgcttccgaaaggaatgcgcggcttattttcgtttatagtcatcagaaataacggggcttatggctggacgaattccacgtgtatttattagcgatctgcttgccagaaccgacatcgtcgatctgatcgatgcgcgggtaaagctgaaaaagcagggcaaaaattttcacgcgtgctgtccgttccataacgaaaaaaccccctctttcaccgtcaacggtgaaaaacagttttaccactgcttcggctgcggggcgcacggcaatgctatcgacttcctgatgaactacgacaagctcgagttcgtggaaacggtcgaagagctggccgccatgcacaacctcgaagtgccttatgaagcaggcaacagacccagccagatagagcgccatcaacggcagaacctctaccagttactggatggtctgaatgcgttttatcaacagtctctgatgcagcccgccgccgatcctgcgcgccagtacctggcgaaacgggggttaagcagcgaggtgattacgcgctttgccatcggctatgctcccccaggttgggataacgttttaaaacggtttggcggcaatcaggaaaaccgccagtcgcttattgatgccggcatgctggtcaccaacgatcagggacgcagttacgaccgcttccgcgaacgggtgatgttccccatccgcgataagcgaggccgggtgattgggtttggcggacgggtgctgggcgatgccctgccgaagtatctgaactccccggaaaccgacatattccataaaggccgccagctgtatggcctgtatgaagcgcagcaggataaccccgaaccaccgcgtttgctggttgtcgaagggtatatggacgtcgtggcgctggcgcagtacgacattaattatgccgtggcctcgctgggtacctcgaccacggccgaccatatccagctgctgttccgggtgacgaataacgtcatctgctgctacgacggcgaccgggccggccgcgatgccgcctggcgcgcgctggagacggcgctgccgtacatgaccgatggtcgccagctacgctttatgtttctgcctgacggcgaagacccggatacgctggtgcgtaaagagggcaaagcggcgttcgaggcgcggatggagcaggctcagccgctctccacgttcttgtttaacagcctgctgccgcaggtcgatctgagtactccggacgggcgcgcgcagctgagcacgctggcgctgccgctgataacccaggtcccgggcgaaacgctgcgcatctatttgcgtcaggagttgggcaataagctgggcattttagatgacgcgcagcttgaacgattaatgccaaaacaggcggaaaatggcgcgccgcgtcccgcaccgcagctaaaacgcacgaccatgcgtatactgataggactgctggtgcaaaacccggatctggcgccgttagtcccgccgctggagggactggactcgcgcaaaatgccgggactgagcctgttcagcgaactggtgaagagctgtctggcgcagcctggtctgacaaccgggcaacttttagagcaatatcgcggcacaaaagaggcggcaacccttgaaaaactgtcgatgtgggacgatatagcagataaagacatcgctgaacaaaccttcaccgactcgctcaaccatatgtttgattcactgctggaactgcgacaggaagagttgatagctcgcgatcgcacacacggtttaagcagtgaagaacgccgggagctctggaccatcagccaggagctggcgaaaaaataaatgacagacaatatccttcacgttgtatcaaagcagtaagaaaacgcagaacaacgtgaaggaaaagtatttaacggcttaagtgccgagtatcgatcgggaagcccccgacagccgcgcagaggcgcagcggcaataatataagtacgccctcgctttaaatgtcgacagcccgtctgccgacaccaatcaaacgaattaagtgtggataccgtcttatggagcaaaacccgcagtcacagctgaagcttcttgtccaacgtggtaaggagcaaggctatctgacctatgccgaggtcaatgaccatctgccggaagatatcgtcgattccgatcagatcgaagacatcatccaaatgatcaacgacatgggtattcaggtgatggaagaagcaccggatgccgatgatctgatgcttgccgaaaacaccgcggatgaagatgctgccgaagccgccgcgcaggtgctctccagcgtggaatccgaaatcgggcgcacgaccgacccggtgcgtatgtacatgcgtgaaatgggtaccgtagagctgctgacccgtgaaggcgaaattgacatcgccaaacgcatcgaagacggcatcaatcaggtgcagtgctccgttgccgaatatccggaagcgatcacctacctgcttgagcagtacgaccgcgttgaagcggaagaagcccgtctgtccgatctgatcaccggtttcgtcgatccgaacgccgaagaagatatggcgccaaccgccacccacgttggctccgagctgtctcaggaagagatggatgacgacgaagacgaagacgaagatgaagacgccgacgacaacagcgatgacgacaacagcatcgacccagagctggcccgtgagaaattcgccgagctgcgtacccagtacgagctgacgcgcgacaccatcaaagccaaaggtcgtagccatgccgccgcccaggaagagatcctgaagctgtctgaagtcttcaagcagttccgcctggtgccgaagcagttcgattacctggtcaacagcatgcgcagcatgatggatcgcgttcgtactcaggaacgtatcatcatgaagctgtgcgttgagcagtgcaaaatgccgaagaaaaacttcatcaccctgttcaccggcaacgaaaccagcgagacctggttcaacgccgcggtggcaatgaacaagccgtggtctgagaagctgctggaagtgaaagaagatgtgcagcgcggcctgcagaagctgcagcagattgaagaagagaccggcctgaccatcgagcaggttaaagatatcaaccgtcgcatgtccatcggcgaagcgaaagcccgtcgtgcgaagaaagagatggttgaagcgaacctgcgtctggttatctctatcgccaagaaatacaccaaccgcggtctgcagttcctcgacctgattcaggaaggcaacatcggtctgatgaaagcggtcgataagttcgaataccgtcgcggctacaagttctcgacctacgccacctggtggatccgtcaggccatcacccgctctatcgcggatcaggcgcgcaccatccgtattccggtgcatatgattgagactatcaacaagctcaaccgtatctcccgtcagatgctgcaggagatgggccgtgaaccgaccccggaagagctggctgagcgtatgctgatgccggaagacaaaatccgtaaagtgctgaagatcgccaaagagcctatctccatggaaacgccgatcggcgacgatgaagattcgcatctgggggatttcatcgaggataccaccctcgagctgccgctggattctgcgaccaccgagagcctgcgcgcggcaacgcatgacgtgctggccggcctcaccgctcgtgaagcgaaagtgctgcgtatgcgtttcggtatcgacatgaacaccgaccacacgctggaagaagtgggtaaacagttcgacgttacccgcgaacgtatccgtcagatcgaagcgaaggcgctgcgtaaactgcgccacccgagccgttctgaagtgctgcgtagcttcctcgacgattaatcgtcgcggggcatcgtctacagcctgttaaaaagctccctgcggggagctttttttatggcgttcaggtggccatcccgggaaagtcgcctctctccgctactggccgcgggttgccagggcatcgtccagttcacgataggccgccaccagcttatcgagcgtcgcccggtttaagccgctgggattaggcagcacccacacctgggtcgtcccgatggtcatagcctgtttcccccacttcgcgccgcgctggttaaaggccagctcgaaggcctgcttgccgagcaccgccagggcctgcggctgatactcctcaattttccgcaccagctcacggccgccgctgcgcagctcctgcaaggcgacctcgctggcctgcaccgtcggacgctctaccagcatggtgatgccgcagcgcgtatccagcagctgcagctcctcttccggcctgagctgccgatcggtgaacccggcctgatggatgaccttccagaagcgattgccaggatgggcaaaatgaaagccggtatgggcggaggacttccccgggttgataccgcaaaagacaacgcgcaggcccggcgcaaggatatcgctaatcatgttttctccggctgtatggctaaaacatgattataaaggattgaaaatgcattgtttataaaaacagcagctgcgcgctttacgctggattgcaatcgccagttactttataatccctcgccacggccccttagctcagtggttagagcaggcgactcataatcgcttggtcgttggttcaaacccaacaggggccaccaaattttagctttaaaatcatataattaagccactcgaaagagtggcttttttgttacctcgtttttgagtggcgataaaatggcggtgaattttttatcaccagtttcctgagcgcataaaaaaacccgcgcgcggcgggcatttatcggaaatttatcagagccacaatggccgctgaccaccaacagtcgggtgaggtggggctggtactatcgtacctggtgtaacaataaaacgctccaccgattccatcgttacaaacgtacagctgcaatttatgttagtgcattgatgataacgctctttggtattctcacttagatagcgactggtgcgcgcatgtgccgcgtgctggcattttggacaatggaacatttcacactccattaattcacataaagtgaattaatgatactcattttttcacaatttgagaatagctttattcttcctccccttcagtcccgtactcgacatccaacaatctaacctcaagctctaaactcgtcgtaaagccactattactcagagagtgcataaccttcgtgattgtccatgactgctcgtctatgacgcgcttaaagcctgaaacctgcacaggtgtctctgggtagaggtcggcgcgtcctgtcgcaagcctgatagaaaactcagcaacaccacgttgcagtttgtcccatttggcctgggcggctcgcatggcctgcgctttggttgaaaaaattgtcgttagggcaaacacgttgtcatcctcgccgaccatgtattcaccctccctggcttccggcgtcttcaccgttttcttcttcgttaccggtttggctttggggtgctgtagcgcacgtaaatgctgctctttgggtttgcgttttaacgaaaccttttgcttttgtggttttgggtctttggtgtgcaaccattttgccgtaacgccggtatatgccccacggtcagcaatggaaaactgatggcggtcgccatcactgcgggtgatcgtgacctgcggaatggcctttccgctggctgtaacccctcgaccggctttgagaaaaagtaactttcccgcttttaccgaaacctcaccgccgtttcgctcggcgagccgtgtcaaaaatttggcatccgattcctgtgactggtcgatgtgcggaatttttattccggccagctccggtataacgctcgacgtcagtttgttacgtgtcgctatcgctgccacgatctcgccgagcgtcttgtcatgccaggactcttcccgacgtgagttcagcgtcccccgaaaatcggcgctacgggcgcggattgtcaccgtgtccggcgcgccatgatgttcaacctcatcgacggtaaaacttcccttaccaatcaacgcaaagcctttccacccgaggtaaagcgtcagtacggcaccgcgtaacggcagctcgaccagcccgtcagcatcatcaagctcgatgtcgagctggtcggcctcgaatccgcgattgtctgtcatggtcagactcatcaaccgattactgatgttgccggtaatatctttgctgtcgagcatcagcataaaatcgggcgtcagttcgccacccgcattcagattcagcatatccagcatcagctaatccccaccatgccggacactgatgaggccatatttcctgccttgccaatcagtgattttgcctgttcgccgatatcgccatacagcgccgcaagggattcatccacgcgggtgagcgtcagcgtaaaatcaattttgcgcgccgttccgtcagcaaaaaacaggcttcctgtctcgctgatattattgatgacgtacataccgtaaatcgtgccggtaccatccagtaacggccaggcgcgcccctcgtcagccattaaacgaatggccgtcatcgtcaactttccgccggtgagctcagggtacaacacaccggccagggtaattttttcatcccccggccccagatactggaaagaatcccgcttacctacgcgggagtttgacggccaccgatattcggcatcgcgttgcatcgtctggtgtggcaacgtctggcgcataaaaacaaacatgccgagtgcaagcatcatttttcgttacctcctgtcagtcgtggttcatgctggcacgctgtcgggcgcgtttttcacgctcaaatttttcgagcgcatcctgtagctggcgatcgagctgcgtaccgctgccgcccccctgaacgtcaatgtgatattcgtttttactttggtctatataagaacgtcccgccggtgcgatgacgggttgatatgcctgatagccaccgtaagtgccggttgccggaatataagagttaccctgcgtggctgcgttcgcttttgcggcagtctggtcaagcgtgctggactctttattaataatgccgagtttctcaagcacccaatcaataccgctgcgcagcttattaaatgccgtcagcggcagcgttaaggcatccgccagccgttgaccgaacaacacaccggcatcacgaaaactgtttaaggtttcctgcgatgacttgaccggcgcaatcaggttgttaaaccagtcccacacggctttcagttttccgcccagccagtcaaacatcggtttaagcggcgcaaacagttcagctactggcgcaaatgcggcccgcatcccttcaatcactccgccgaaaaatgcgctgatgggctcccaatatttacggatgagcaatgccccggcgacaatcgcggccacaacagcgacaaccggccaggaaatcgcgccaatagcggtaatgatgcctccggccaccgttgtaaatacggtaccgagcgccgtcgcagcggcgatgatggcattaactcccgttataaccggccaggcaatcagcccaatggccccaatcatacccaccacgccaagcgccacggcggtaatcaccccaagcgtctgcgcaagctctttatttcgctggatccacttatcaagtttgagcacgtagccagtcgcagtctgcaccagtttgcgtaatgaggattcctgctggtcaaacaggtcggtgccaacagcctcatacgcagactgaaactctttgaagtcgccgccgaggttatcctgcataactttaaccagctcctcggtcttgccgtccgaggctttaaatgccgctgtcagcttatcgagtttcccgctggccgcagcgtctaacagggcattagacgatttcagcgcttcctcgccgaatatcgttttcaggtattcgcctgtctgacttgttccgagcttattctttttaaaactggcctggatttctttcagaatggtaaatacgggccgcatgttgcccttgctatctgccgtcttaacccccagctcttttaatgccgcccatgccttacctgttggggcctgtaaccggctgacgacagcgctgctcccggtaccggccatcgatcccgtgatattgttatcatgaagcacacccgtcatggcggcggcttcttcgaggcttactcccgcagctttggcaactggggccagataggttaaggcgtcgcttaatccctgaaaatcggccgctgatttattcatcgttgctgaaagcacatcgccgatatgggctacccggtcatttgaaagctggaaagcgtttttggtaccgagcaaaagctgcgcgttctcttccatcgtccgccggttagcgagcgccatattcagcgtgacgggggtcgcagcctggattgctgccgcatcgccgcccgctttcgcgatgataatctgagctccggcagcatcatcggcagaggcggcagtattgtcgcccagcagtcgggcctgctttcgcaaagccgtcatttctgcggagtctttcgccacaccgagtacagcctgtaactcggagtttttctgcgcaaaatcataacccggtttcatcagtgcaacaccggccagcgttccggtcgttgccataccaacaccggcggcacccattgcggccgcgtttccggccagctccttaccggcctgatatcgctgtttaaccgcgttgagctttgcctgttgcgcgctgacgcgcgccagcgcttcacgctgtcgattgagctgcgtcgtcgtttcgctgatgttggtttttaaccgacgctcgtctgccgccagggtgcgggtattgattcccgcctggctgagttcctgccgctggcgctgtacggcctgccgcaagctgttgtgtttgagctggagcgcggcggcactttttcgggcggcatccattgcctgcgcctgcgcgcgcgtcggctgttcagtatttctaaattggatcgccagtgccgcggcttcctgtttagcttgcttcagctcctgaccggtaatggcaagttgcgcgctggccttgcgaaacccgtcgatacgggatgcctggtcgttcagttcacgcagtgatttttgagtgtcccggatatcaccagacagcgttttactcgctgtctggatggatttaaacgggcgggtcgcctggtcaacagccttgagtaaaacctgcaatttaacgtcgttactcattcgtgtttccgcttcgctgtagcgccttttcgcgccaggtggtgagctcggtcaggctcatgggatataactctgatggcggccagtgaaaaatcaccgcgatatccgccatcaggtcatcgaccgacatgtctttcgggaaatttaatccgccaaattcggcgacaaaaaaccgatcacctttgttgccagcgccatcaggtcgggcaaatccatcatgacgacatccgattcggtaagagacggactggtcatacgcggcagcactttaatcagggcatccacttcagagcgcgcaacgtctgccaggctaacgccgcgcagggttccggcgttaggcttcatcagggtgattttttcgatgacctgctcgccgcgtttgatcgggttttccagggtgacgatgttttctttgctcatgagtttctcactatttacggattccgggttaaccggccagacatgctggctggggaaaaattacaggccgatattgcggcggtgctggtcgagtcggtcgacgccgttcaccttctcaatcatgttgaggacgtcgatttctaccagctctttaccgttcatggtcagcttgtagtacgtgcagaccagcgataatttgctgctggtatcctcgccctgtttgctctcgccgttatcgacttccttcaccttgaaacgggtctcaacttccaccgccacggtttctccggtatcgtcccgctggtaagagcctgcatagcgcagtagcgtcccggtaccgacggcaccataaagcgaccagatcgcatcatcagggaagccgccgagggaaatctccatcgccagcgcgtcatcgtcgaggccgaaatcgacaggggctgagcctgacatcccgccgccccggtaattttccagcttacgggtcagcttaggcagggtgacggactcgataacgccgagatagctgacgccatccagaaacgtgttcagatatttgagcttgcgcggcattgccattggtcagggctccttaattgctgttaaccgatgacaccagattcgccaggtatttatcggtaatgcgctggcgtagcgtcaggttttcgagagggggaaccggcgtatagtcgtaatcgatatacagttttccggctttgagggtcgccgcgtcgttggccgattcatcaaaccagcaggtcgcatcgacgatatagcccgccgttttcatctcgcggaatttcgcattgatacccgcaacgatgtccttaatcagcgtggcagtgatcggcttgtcgaccgcccacatgtgaccagcggccattgtgtcagcgataacctgcgcggtgcgggtgtagttctcgaacaagaacagcgggtcatcggagcagcagcggttgccccagaagcggaaaccgtctttacgaatgagcgtggtgacgcctgcctcgttaagcaggtcggcatcggtgccggattcctgcaaatcccagaagaccgacgcgctgatgccggtgacgccattcacaccaacgtttgacagggttttatgccagccagtgtcctggtcgattttggcgcgcaggcccagcgctcgggcggtcgcccagacggtttcggtcgcgttcgccgtggtgtcccatgccagaaaatccggccagataaccatcagctcacgctggctgaaattctcgcgatagagcatcgcctcggaaatgttctggcaatcccaggcgctgatatagccaaaggcacgcagcttctggcaaatcggcgcgagggcggtcgccacttcgagggaatcgagacccggcacaccgaggatgcgcggtttaacgccggtgacggcctccgccgtgagcagcgctttcagcccggtgtaattgccgctttcgtcggtgccgccgatgatattagagatagtctgcgcttcggcatcgtcgccagtaccttcggcaacgcgcacaacaacaatgaccggtttcgactggtcggcgattgcctggagggatgcggccagagtgccttttgtacccgctttggcgatggcgctttgcacgctggtaatcagtgcgggcttattaagtgggaaggtggcggcatcggcatcgctggccgtacagaccatgccgataatcgccgttgatacggtggaaatgacgcgggtgccgtcgttaatctcgacaacctggacgccgtgatgaaaatcgctcatccgtttaactccgtggttaagggtgagcattattttcaatcgtgggggaaggggtgacgagtcatccccgctgtaacagggacagtacaacaggaatgaccgtcacaggtcaggctacgcggctccagcacatcagcagggtgtgcgcttccaccacgctgaacgatttaccctcgccgaggttgtcggttttaccggtgacgtcatggtgatgcggtgggatatcaatatcatgctcatggtccggttcctcgtcggtatcgcccaggtttgccgggttaaagcgctggctgatatcaccgccaatctcccacgggttctccctgctcggcactccgccatgtttgtgtttaccggcgggttttgtggtcagcgtttgctcgggctgttcgctggtctcgccgctcacgtcaatctgcacagcgggcaggttatcgcgccggagcgtgacgttatcactgccgccgatagtgccgacgtccgagccgtcagctttaccgatgcggatcgttttgttttcgccggtataaacccattctgtccacggatagcgctcgttagggttgacgttctgcgcgtaaaacttcaccgtgccaacagggttgtccagctcccacgcagaacggatggctgattcaaccgccagcctgacagccagtggcgtagcggctctgtcctggtcttcgccgtcaatggcgttgctgagtcgggtaaaccctttttcgtccagcgtggcgtccgggtgatctcttgaccctgcgtgctcgcccaattgttcgtcgacatagtctttaatctcgttaccggcgttaatcacgtcctccacggttgccagcacaattcccgggtcaacaaccagctcaacggcttcggtgctgctgaccgccagccagattctcagaatggtaaagcgccccgaaccttcggtaagtgctggtttataggtctccggcacattggcaaccgccatgcaaataccggcatcgtcaaacagcgctgcctccctgatggtaaacccacccacctctggcggaataatcatctccgcgataatgatattttcggtatcggacaacttcaggctgttaagctgggttctgaaacactcgttaatcaatgaattcttattttcatcgggaattattgcagtgcctctgccatcacccaccgacatttgagaaaaaacaaccttattcccgctaacgattgcggcagctattttttttcgaccggcaaccgttactaccgatttaaaaatcttgctcatcttgatttactccgcatatttgacgaacatcggcaattactgacttttatcgtctggtatttttttgtgtttattattttgcttctaaggcagataatcttttttcaaataacttttgtttttcgacggtcgcccggagcatccacagaagcagctcttctttcctgaaagaataaacgccgccagccggaatgatatttccttcgctgtcggtttcttcctgccatgagtcgtagcagaatgccgaataatccgtccagttcaggccgtgtttacccatcacttcaatggctgcctgcacagttggacccgaatgcaacctggcttcatcgccctctatctggtatttctccagccactgccatgcccacggaagggatgctatctcataaaatgccgccatttcggcttcagacgggttaacaggtaccgtcttgtgattggcgtcagacgtatttattgtgctgtttgccgcataaagttgcttccagcgcagcgatgtcgcacccagcgccgactggttatcaatggtaggcgaaataccccccgcaccgatggacgctccgcccgtagaggaggttggcgcaccggcagcatacacatcaatacggaacgatgtcgggtaataactgaccttcaccccaccgatgccggagttatctgcgtacccgttagggttggccgcatttttaccgtgattgtaagacaccacgaaaggcgaagatgacaactgtgacatgtcgtcggtgtagaaacgcaggtacgcgcccgaatacggatgctcccatgcagccatcgccccggcttcagaatcaacacgcccgccacgaacataacgggcaacagggcgcaacgacaaggtgccgcgtttttgtccgcgaacctctgacacctggtcggtgatggtcgctttcagggttcgggttacatcaatctgggtatcaaagttgaccttgccggagttataaaccaggttgttaacgttcttaccgtaattacccacatacagttcgccagcctgctccccaacctgatggtttatcatcactgtctgatgcgcatcgctgacggcattacccgcctggcagttctgcattattgagccaatgccaataatggtcaggtcaacgccacctgtcaccaacccattcccgacgctcacgcacttatcaaccagctgctgccgaccttcttttgcaatgagtccgtgagagccattacgttctgtatggcaactgataaaccggttatagccgccctggcccactatgccggttctgcgattgccaaccccccggcagttggtcgcggtgagatgctggtcgaggtacgttgttgagcctgaaccatacgcattctgcacatcaaagccgtcataccactgacctgcgcccagacagtcggtgacgttgatattagttgaacagatatcggtatcagtccagtcacgcacaatgtactgcccgaatttaacacccgattctgcgttatcaataaaattacagccgctgacgtaaattccgtccgtacccgtaatgttgaggcccatcgcacggccttcgaacagcgtgcagttggtaatggtatggtttttcccacgcgcccacttgaaatcattcagattcgttgcactggtttcatgaacatacccaaacatgactttatcgcgggtatggttgatgatgctgatagcccccatattgcacccgccgcgaattacgcagtcatcaaacagagtattaataaaccctgcggcaatgaccgaggcataactccccctgacgccggtaaccgtcaatccatcctgtgcggttgcatccgatgagcggaatacaatcgcacagcagacgtcctgataaaggtatcctgaatcaacgtcagtggcgtcctgaaatggcatccgaccataacccagccgcccctgctcttttatcgtccagtcgtcattataaataaccgcccacggtattgttttgctgagtaagttaccgcctcgccacaccgacccgccgccgtcaataatatcaacggctacgccatcacaaactattttagccgtcccggcgtcaacattgattttcccggtgtactgaatgacaccaggctgaatgttgtaggttttcgtcgagtccaggacaacctgtgccgcgttctggttcagcgcccactggatagcagcagtatcatcgtcatcattacccgcaccagtcacaaaaccagacatttccggcgtgacgtagttcaggccgcctacgagtttagcgccgctatcagccgccagattttgtctaatggctgcatctgatgtatacgcccagccccccgccctcacacctccggtcgttgccggagatgacgctatcggcacggttttagggaactccccggtccagacaagtcgatagtttccgtacagaatttcttccctgggggattccagcgtcgccccctccgtaaaggtttttaccgcactaaccttttcagcgacaagctttcctgactcttcagcctgctccttgagataacgcgtacggttagccaggcttttcagtggccggtttgcaacgccgtccagacctccagaaacgcgctcgcttctggaaataagctcaatatcttcttcccacgatgaggattctggaattctggtcataaacttacccgtagttaaaattaccgtcgtgaaaaatcacgccgttatatgtgatattttctcctgcctcaaaatcggccggataaatactgataatgtcgctgctgcacagcgttgagccgacatgaatatcacctcgtacttttgcggatatattgagctgtgccatatgtcgactcacaggctttgcatcgttaatcaaccgggtcagctcatcgagcatcctggatgtgataccaatatcattcacatccacttccagacggaaagtcccggcagggtctgccacctcccaccactctgcgatggagaatgaataacccattttttcgactacatagcggattgctgctattgtcccttttcgctgatggagccagaacgactcactgacaaccgttcttttctcttgttcgctccagctttcatcccagctatctacggagaaggcccacgccagatagggcagaaatttcacggggcatttccacgggttccacaggtcacgcagcggcacgtttaaatcgctgatggaggcgcatgcggcggcggctcgctgttccagcaccgacgacccggtcgccatcagcgagttactcatcggagcctccgatcacgacactggtttcggtgcagtacgcggcctgggttttatcgagtacgacgtcggccagcggttcgcgcagttcgacacgctggacaccctgcacatgcagcgcggcatagatggcagatagtcgaatatcccgaccaaggcggcgctgttccgtaatataggcagttaactgcgcttttgcggcggcaagaatcggctcggtcgctggtccggggtaaacatacagcactgcgtcgatcgcataattgacgatttcagccgagacgactgtcaggcggtcagcgaccggtcgtacactctcatcatttagcgcggtactgacggccagcaataaatcatccgacgccgtgccgtcaccttcccgcgatagtaccgcgatagtgacctcagctggagccgggctattagccgaagcatccgcgacacgtccgtcggcactcagggcgtgaaattcataggcaccggttggcccagcaacactcataccctcaaatgccgccggtacgcgctgacgtaaatcactgtcagattccatgaccgccgccaccggcgggatttgggtctcgtctccgggggtgatgaccaggcgttcaacgttattatttgccgcgagctggtcgaggtcgtttttgatggcataggccaccatcccggctttcgccgcctcgttaatgcgctggcgtaaaatcacctcacgataggcattctcttcgagatatttcaccagtggctcagactccagcgttaatgtcctggcgaccgcttcctgctcatcttccgggtacagtgaaatcagcgtcgctttgcgctcggcgaggatggtttcaaaatccagtgtttccaccacatcaggcgcggggagctggctcaggtcgataactgccataggttcaactcacagggatggttaaggaaaggctctcaccggtatcggtgatttggccggtcacgtcgacgaccatctgcccgttaaactgccgcgctgtggtgatgctggtcagcctgacgcgcggctcccacttcaggatcgccatgtagcacgcggccataatttgcagctcaagtgccggtgtctgaggctggtcaatcatctgcgacaacagcgagccgtattcacgacgcatgacgcgggagccgacgggcgtgcgcagaatatccccgatgctctgactgatatggtcaacgtctgaaatgctttcaccggtcgtgcgattcatgccgagataacgcgccgtcattgggtgccctccgtccattcatcgccgcgcctgatgccgccgtggccgtgtttatccacctgcacaccgttggaagtgaaagcgccgccgctgtgctcgatatcacctgacatcttgccgccttgctttacctccagcgtgccggtcgtcagcttgttggtgcagaccacctccggtgtatcgagggtgacgcgggtctcggcttttaccagcaccaccggcacgctgacggcaaccgaatcggatgcggtcacatcggcggttttaatgccggtgacggtcagcgcgccggtttccggctcataactcataacggcaccgtcgggaaattcaacgtgccaggcatcagcagaggccgacggcgcggggttgtcgtcggaataaatacccggcagcacaaaagcggtatcgagctcaccgcccacggccagaatcatcacctgctcaccaatggagggagcccaccaggtgcgcgagcgcccggcccgatgcgtcagccactggagccagtcggtataaatgccgccggtctgcacgcgacagcgcccggcgtcgaggtcagtttcgacgacgattccggtgcggatcatgttgcgtatcgcgcgggcgagttcctggatagatgcgagagtattcatatgggaaaggatgccgccggggtgttccggcggcaatctgcgggcgttttgccctggctggcacaacgttatctgtatcagcccggatttgacctgacacatcgatgacatcgaaccagacctaatctgacgggccgctctgtgccatagcagacacatttatttaacagtacaaaaaaacaacctgcgcaataaattatcaatgacgataaaatcattcacaatgcaaccaaccactagtaatttataatttagttatttataaattaaatttcttaaaaatcacactcctcctgttgattggaagaacaaaattaactccaaagtttttatcaggaccataacaagctatcaattcagaaaaaatatcatgatacaattcattctttaatgaattatcgtaaagatactccatgacatagcgtgagatataacctgccagaacatctgcaagctgaattcccgcagatttttttgagtctgggaattttaaattcaggtccgtttttatattaaaatccgttgttgaatcgaatggattttttacgtttgagttttttaattgctccgagcagaaaatcaaaatatcatcaaaatgatcttgtttgtcatgaaaaaatgtcacatctgatatatcaccattatggtacttatttactttacccataatattgaaccatgaatgcacatgaggcaataaatgtatttcattacatttcttgttaatgtcaggtataggaacaagattttttatcaaatcagtatttgatgatttattagaatgataaaatctgatagtagattgcaggcagcgtacagcatcagatttgtacttaaaagtaaattctttacttctgaaataagttctcaactttttcattgacgctagcaaagcggcttcggacttatctatacatgcctcaaaaaaagacatatagcaatctagtggtagattctctgacaagtaatcagatagttcgttacgaaatccttgcgcattgatttctgaatcaaactgttgaaaatatggcgggcaaatctgatgattgacaattgagacagcaatacaatattttttatcgacaacctcaacataaaatggcaatttgttttttgcaatataatcaaataaatcatagatgaatcctggttttgatttatatagattcttagattttaactcttctccttggaccctgtgtttgctttttaatgaatcaatatatttttgaagatcatcgcaatcaggaaccccgatacaagataatgcaaaaaatggttggttagcaaaattcaaatccggtggatttttaaccaaatccccagtattcccactctcatctaaaaaatactgatttaacatttctcctccgtttttattaacgctcttcagtgtaaggcatctttatacctaaaaccattcgccccaaagtaactaatttatatatctaatctaaatagcaggtcctaataccgctacatcctacaggaaacttgtggctcaaggatagtcagcctcatgccttgaacacttttataccaaggctcaagagtagtagtgatgatcagcaaaataatcactattagttactaagtgttctgctatccggaatagccattcagcattgtcgttaaacatatcagaaacttccactcctcgctcaaagcaggctgtcagatttgattatgtacgccactaaaaactgtatcagctcaatcggcgaggtagtcgataatgacgctttccacaagctgacggtcatcgtctataaagcccaggagctggcgctgtggatactcgacggcggcgcttttgggggatggtttatccttgagcccgagctgatgcacgcgagcgatgcgctgtactttcccggtaaattccaccaacgccgcgctgtcgttaccgctcgctttcatataacggttggttcgcagtttcgcgaacatctcgcgcttaatccggcctttctttgccctgacgggctggcgcttacgcggggcaaatggcgaaccgtccggcgctttctgcgacttaatgcgctgctgttgccgctggcgcagtttcttcgcaatgtcggcggtcatctggcgacgcccggcgggagaaagggccgctatcaacccggcgagcttgtcctcaaagggtttgaagtcattcatcccatttactcaccagttcgccattactccacatctcaacagggcgcgtcaccggctccggcggtggcggctccgggatgttctcaacgtacatcgcgccgtcggcctctttgacctgggtgcgctcggtcagcaacaggctgatgctgacatcaaggctgctgtcgttattaatgtcagcgtaccaggcaaatcctttttttctcccctcgtcggttgtcatgatgtccggctgattgactcgcagccaggccataatcggcacaaacagcaggtcaatatcgtcggtaaaatccgtgaccacgatgttaagcgtgtaccgcttttcaaacgacagggagctcgccagcgtcgccatattgttgccatcgtccaggcgaaggcaaagcatatcggggttagtacgcagtaccggcaccgcatcagttaaggcttttcgcagactgttgggcttttgcatcgatttcatcctggcattgtttaaccgtatcgacctggattgcgcaacttttcagggcgttttcgagctggcgtatatccgcactcaggtcgccattagttagcgggtcgctgcccggcatcgggcaggggctgaccttcgggcaggcgttgtaaacaatcaccggcggcggcgttggtgcaggcggtgcgctggtgcaaccggcgcacagcatcaggtaaatcagagcgataccagcggcgaaacgcgtcattttcattgagtaacctcgtgatagtttgttcacgcctgaaggccagcaggttagcggcggtgagcttatcccgcatgacaacctgcgccagctctttacgctgcgactgctctgcggcaacgttgagctgatttttcagcatggtgattgtcattttgtgttcaccagcgacccggttcgcacgctcaaatgaggcgcgcaaattgctgttatcgtgtcgcatccacagcagacccgcacaggccagcgccagcaggagaatcactatcttcatgcagttccccctccggccttgcgccacacggcgaccagcttgtcgaggctgtgctcacgctgaccgtatccggcacccggcaatgaagcccagatattgcgacagcgggaaatcgcacgctcgatgcgcccctgctgcaaatcttccagcgcaccacgctcccgaataagctgaatggcgagcctgtcctgtgataccgggctgaaatccggcaaagcgagctgtttctgataatgcggccagaacaggtaaagctgctggtaacgcccggatgccgtagatttttccccgcgacgattgaagaccttcgccgggcgtccaccggcgaacgggtgatcgcgataatcggtaaaaatctccggcttgccatcgatacccgtgacgataacgtcgtaaccgttgtttcgggtcagcgggtgcatcgccgtcccttcagaaaatgccagcatgtcgaggaatgccgcgacgttggggtgtgtcttaatgaccgccatcgctttccccttttttaatcctgcgctgaattgcaatctccaccgcctgataaccggcgatacccagcatggagccaaatccgcacacggccgcgggcggcaggtcgggaaactgcaccagggcaaccccggccaccatcgaaacaaagccgcccagcagcatgcgaccaataaaaagccgggcggtgatgggctcaccaccggccagcaccttaccgacgacaatcagcacgccgataacaaagagggacaggacgcttttttcaccttccgtcatgtgtttactcccacagattaattgtttcagttacgggggatgactggacatcgggcaattcgaccaccgtgccatgtggcagcactgcgccgagttcggccagccccggatttgcggcgagcaccgactcgaagacccgctcagtgcgcccgtaataccgggcgcaaatcatgtcgagcgtgtcgccctgttgcgcgatggcctgcatcagatttggctcacgatgcagcggggtttgtcctggacgcgtgatacggcccagcgcatgtcccgccacagctcgtcgacagtggtatcgatgctgtcggctttcttgtcgcctctggcgctggcatccacaccgcgataacgctcgtagagcgtggcggttgccattgaggtgacggcgcgcaggtaatagaaaactcgcacactctcaccgtcgagatcgtcagccggtacgtcggccagcttgctaaaacccccggcaatctgctgttcccgccacaaaaacagctcggcattggtttcggcgatgccggttttgatggcctcacgcagccgggccggggcgacggtctgctcaagtcgcatcccttcacgcacgcgtttcgggtcgatgtcaggaaagaaaaacgtattttttatcaccggctcatcgctggcaggcggcgggatgatcaccacgccacccggctgcggctcatcgttctttttaataatcagcgtcgtcatgactacctctgaataggtgggcggtggacgccggtctcaggtcaggtaaaacaccctcatcgaccggcgtgccgccctggcgcggggcgcattctgttaaccgacggtctttttcgggcggccacgtttagccggtgccgtggttttcacggcgcgcggcgcgcttaccggggctttaacgactgctgccggtttgggcttcagctctcgctcaagccgttcaatgtcttttttgacgcctgcctgacagtcgagctgcatcgctcgcttgaggtgggccagcgcgtcggcgggctgtttgttgtcccgcagcaccaagccggtgattttgtgcagttttgcgcgcacctcatcaggcatatcggcggcggcggtcagcgccagcgtgtcgagcagctggctgacgacgaccggttcaccggcggcatgggcgcgcatggcggcgagcgccacctcttcggtaaacatgtactgcggcgggcggcggtgtttgcctggcatggtcagaccgtacttaaacgcgtagcgggcaatatccatcgcgccgccgatatcgccgacatcgagacgccatagcatgacggtcatcacgatgtcatcctgtgcacctttgccctgttccagcacgccactgacccacggcagatagaacggcagcagctcgcgctttttcgtggctttcagctctttaccaaagatggcttttaacgtgcgttggtctgcggccagcttaaccagcatctgctcgtaggcagtggcatgccgcagcgggttgttttcccgctgcgcggtttcaatggccgagacccgcatcatgtgacgctgtgcggggctcgtcatcggttagccctccggttgtgcggcagagaaatcgcccagcttgatattttcaatgaagcacccggcggagtaggtttcgaccacgtaatcgatgttcatcgattcgtagttttccacctggtcgagtttcgggttttcgataatggagcggcgatgactttcatccatgaaatagatggacaggttatcgagacgcgtcaccataatcgcgttcgctgggaagtacggcacacggacggcgggcaggttgccgatgcgtttctggctgatgatgatgtcagccgcgagcgcttcgctgttgggctggtctttgttaacgatcgggaaatatttgtcggccagcagcttacggcccacaatcgctacaagttcggcatcttcctgataaatctcgtcaatcaggttgtcggttgcatccatgaccagcgcatcgaggttaacgtaatcgccgtttttacccacacggatcacagcggaaacaacattcccttcttcgtcgacaattttgctcatcacgcgggtcggcgcttcattacggtatttctgcagccagccgacggcgacgtcctgcaacatcggatgagtggcgcggtcagaggtttcggcgcgctcaacgccgttgaacccggccatgatgaaatcgagcgcctgccgctggatgatggcatcgcgaatacggcgctggaagtcctggaagcgcgcccacaaatccagctttttatatttgaagtggaagtcaaagttgacctgatcgcactcgtattttttggactccagcgcggtaaagtcggcggttttacgctccttgccgctgttggtgtccgtggtgctggcgatggtgccattgacgccgacgccaattttttcacccttcagctcatccaccggcacgatattaattttctgcaaaaaggccgatgacatctgcacggtgttcatcatggtttgcgtgacggacggctcgacggagaattttttactcacgtcgtccgggtcgatgccgttcagctcggcaacgcgggacaggtaggcattgaatttaaaacgggtttcctgacgcatagtctttcctgttgggttaaatcgggttgtctgaccgggcaagcctgtcgcccggcgataaattcacgaccgtttagcagtcggtcagcagctcatcgccaccgccaccggtggagagcttgcggcgtggctgcgtggtgctttcggtgttatccagcgacgtttttaacttgctgaatgcctggctggtctggtcagccttcgtggtgacgtcctgtttcagcgtcgcaaaggcattttccagcgtggcaagacgctgttcagtggcagtgaggttttcctgcacatgttcactgacggtcgtcacggcttcatgcacatcctgaaaacgggcgtcatcgctggcctgtttgcggctgaagatcgctttcactttgtcgctcagggcggtaaagacattttccgcctggtcttcaaactccagctcggcgagagtggcgacagaaatcaggttgcccggctcggctttgaagcggttgagggggttaaatttggcaccccggcaaaattcgaggtattcggtgccgaggctggccgggtcatcggtcaccgcgaggccgaccaggtagcatttaccgctattggcgaaattcggctgaatttccattgaggtgtagaccttctgcaattttttattcattgcgatcaggtcatcggtcggggtgattttggcgaacagcgccagcttgcctttcagtaccgaatcgtcatcaatcttttcagacttcagctcaaccacatcgccgtaacggctgaacgggccatccggcaggatgcccttcaggtgttcgaggttaatgcggcaaccatagacgcgggggtcaaaggtctctgccatttcctgaatatccgtcgcgctgataacgcggccgtcacaggtatcgccttcgacgccgatgcgaaaccattttgaaactttttttgccattgtcaggagtcctgatatcgggttaacgggtcggggttagtttcccgacgtcgccgcccacccgctatcaatcccggatggcttatccctcacacaacagcaccttagcgattcgcatcacccgtttctttagccttgccctgtatcaatcacggcgaggcatccatgaccatcaccaccgacaccactttgttaaacgacccgcgacgccaggcggctttattgtactggcaggggttttccgtgccgcagattgccgaaatgttgcagaccaaacgcccgacagtgcagagctggaaacagcgcgaccagtgggaggaaaccgcaccgctgaaccgggtcgaaagcaccttagaggcccggctgatccagctttacgcaaagcccaacctgacaccccacgatttcaaggtggcggattttctggcccgacagatggagcgctttgcgcgcattaatcgctatggccagaccggaaatgaggttgaccttaatcccaatgtggccaaccgcaacaaaggcgaccgcaaaaagccgacaaagaactttttcagcgacgaggctatcgagaaactggaagagatttttttcgcggagtctttcgagtatcagctccgctggcaccgcgccgggcttgagcaccgtattcgcgacattctgaaatcgcgccagattggggcgacgttctacttttcccgcgaggcgctgctgcatgcgctgaaaaccggccataaccagattttcctgtcagcgagtaagacgcaggcgtatgtattccgcgagtacatcattcagtttgcccgccgggtcgatgtcgacctgaccggcgacccgattgtcatcggcaacaacggcgcaaagctgatttttctcggcaccaactcaaacaccgcgcagagccacaacggcgacctgtatgtcgacgaaattttctggatccccaacttccagaaactacgcaaagtgtcgtcgggcatggcctcacaaagccacctgcgcagcacctacttttcgacaccttccaccctggcacacggcgcttacccgttctggtcgggggaattattcaaccggggccgcgccagcgccagcgagcgggttgatatcgatatcagtcatgacgcgctcgccgctggcgtggcgtgtcctgacggtcagtggcggcagattgtcaccattgaggatgcgctcgccgggggctgtacgctgttcaatctggagcaactcaagcgcgaaaacagcgtcgacgacttccgcaatctgtttatgtgcgagttcgttgacgacaaggcgtcggtgttcccgttcgaggatttgcaacgctgcatggtcgacagtctggaagaatgggaagactttgcgccgttcgccgacaacccgttcggctcccgcccggtctgggtgggatacgacccttcgcacagcggcgacagcgccgggtgtgtggtgctcgcaccgccggttgtcgccgggggcaagtttcgcattctggagcgccatcagtggaaaggcatggacttcgcgactcaggccgaatccatccgccagctcaccgaaaaatacaacgtcgagtacatcggtatcgatgcgaccggcctcggtattggcgtcttccagctggttcgctcgttttatcccgccgcccgcgatatccgctacacgccggaaatgaaaaccgcaatggtgctgaaggcaaaagacgtgattcgccgcggctgtctcgaatacgacgtcagcgccaccgacatcaccacctcgtttatggctatccgcaagaccatgaccagcagcgggcgcagcgcgacctatgaggccagccgcaccgaggaggccagtcacgcggacgtcgcctgggcgaccatgcacgcgctgttaaacgaaccgcttaccgctggcagcggccaggtaacatcatccattctggagttcaactgatgagtaaatacaaaggccgcaagccacagccacaaaagcgcccgcgcaacatgaaagacagcgcgccccaaaaaatggaggcgtttacctttggtgaaccgagcgccgtgctcgaccgccgcgatattctggattacgtggaatgcgtcaataatggccgctggttcgaaccgccggtcagctttaacgggctggcgaaaagcctgcgcgccgccgttcaccacagctcgccgatttacgttaagcgcaacattctggcctcaacgtttattccgcacccgctactgtcacaacaggacttcagccgcttcgcgcttgattttctggtgtttggcaacgcgtttttagagctccgaaagagtgtcaccggtcgcccgctgaagctggaagcgtcaccggctaaatacacgcggcgtggtattgaagatgatgtctattggtgggtgccgtcattcgaccagccgcacccgttcgcgccgggatccgtattccatctgctggagcctgacatcaaccaggagctgtacggcatgccggaatatctcagcgcgctaaactccgcctggctgaatgaagcggcgacgctgttccgtcgcaagtattaccagaacggggctcatgcgggttacatcatgtatgtgacggacgccgcgcaaagcggtaccgatgttgaggcgctgcgcgatgcgatgcgcagctcgaaggggctcggcaacttcaaaaatctgtttttctacgcaccgcacggaaaaccggacggcattaaaattgtgccgctcagtgaggtggcaacgaaagacgatttcttcaatatcaaaaaagtcagcgccgccgacctgctcgacgctcaccgcatcccgtttcagctgatgggcggcaagccggaaaacgtcggttcgctcggtgatatcgagaaggtggcaaaggtttttgtccgtaacgagctcataccgctacaagaccggatgcgcgaggtcaacgcgtgggccggtcaggaggtgatccgattcaaaagttacaccctcgacaccgaaagtgactgatttccgccgcctccgggcggctttttattacccccacgcctgaccgcctcagaagcccgccaagccctcaaacacccccgcaccacccaccaacaccctcgcgaacctgcgcggcacagcgacgcgctcaggctgcgaaaataaatgcgcaaaagtacgctggcgcgcagtgctttccccgcctcgcctgcgcacttaacgggtcgcttttaatgcaattgcatcaggagccccgagccgcgcgagcgttggcgctggctggcaaatactggaataaaaaaacgaatgcaaactcatgcaccttttgcatgcagcttactttattgttgcctgataacgagaataggcgtcctcaaaagcttttaagtatgcctttggcaaatcaaattcatatgtgttgaggttggttgttataaatagcttaccttttttaaaatctatgtttttattcatatcaaataacgcatatgtcgaccaccaagcaacccctgagtcgattgtaaatttaacgcttttcatttcacctttatatgatagcgttatatcacgatggcctataactttatctaaagagcatcgggctgatgttcctcccagagagaaaaaaacaccagtaatattcaccgtcatatttctcatattctgaataatgagattacaattcacccccttaccatgagtaacatccacacttattccatgagtaaccctgattttttcattctcattctgagtagcttgatacgccatgtacaatgagactaacacggcaagtagagttgcaattgcagataaccacccacccagcatactccacaaagccacctcaccggcatgattcttatcagcccacccccaattaaagccaccgaggaaaaaacctaaaacgaacatcaaagcagaaaggataattatgccgaaaaattttaaattcatatgataaccccacgtccaaacagcttttaatttacgcatcctaacgcctcacaaggctcgttgttcaaccccgccagcactgaaatcgagtttcagcaccggcggcgttcgtcacaatattggttaattgtcgagtatcgactcgacttcacccgttcgcacgtttacgcgcgctgcaaccgtttgtttaaccactccaccataagcattagtaccacgaaatgttgtttttacaatggcatgtgggtctttattcaaaatcagatgataaacagttgaaacatgtttataagaggagtcatcgttcatactgtctttaatcattttttctaacggacgataggaaccgtcccatccgctgaaattactcttaaacgtatcaaggttaattttactgtttagcgattgtgggtctctttcaaagtcgttgaaacaccaccccaaaacatcaccaagctttaagctctcatctttagtaaaggtatattcgctcatacaagcatagaaagcacttttagcgtttgctggtacacctttgaagccaacatagtctttaacgatatcgtgccgtgtttcttttggctcgttacgatactctttaagtgttttatctgcatatttgaatgctggcgtagtcggttccgctttaatctctgacacgtcattttttaccacaggttgacttttttcagtcggccataatattgagccaataacggccagcgccaggcatccgccgaggtaaaccgcgctggagcgcttacggttcggcatccgaacaagcgatggcttgattaaacccacgataaaagcaataaagagagccagagataaaaatgctattacggtatccatgattttcctttgtatgtaatcctcatataaaacaaccccatgctatcaaacatagggttgaaagttgcacatttttcagggattaacgccagctttcatcttcccatacttcctgaaggatactatccagcgcttcgcggtctgagtctttatcgaaccccatcagctcaacacctgtcatggatccctttctaactgtaacgcgcgttgacggaaaaacagactgtattcgccttgtcaattcgcattgaaaagcatcaataaccggctggccaattttttggtctttatccaacgtaatgtttaccctcacttcaccacctctttttaatcgttctttagcgggcgtcgcggagaaaacaaccgaaaaggagttgtttttcattaagttccctctggctatctccgcaattaaattcaatgcgatttcgcggtctctttccttacaagtaccctctgccgtcagacgcgcaatcatttcgactcgctcaatcataacgtgctcgcttaactctctatccacataacctccgatacgagatactgtataaacatacagtatcacgtatcggtaaaaggtgtgaagaaaaaatgaagtgaaatacactgtatgtacatgatatggatgaatattaatgattacttttcattgccagttcagctatagccgcaacacgattaaggattttcatggctttggcctcatgtgagggcgctgcggaaaatatttctcctcttgctgtcccgcgcagccatttgccctcaaaacagcttttaccacccctcatcaggtgcagggcttcgccccggctgattgtgttgccggttgtcagatgtatctcgtctatggttttcgctattgctgcgttttgctcatcctttccgtggatgaattttcgccgtgttgctggctttttcttcctgagtcggttggtcagctctcgtttttcacgccgactcaatggttttgttaaatccagtgctggcggttcgctttcgctccccgtacagttattgacagaactccgagagggcgcaggagcgcccttaacgtcaacggccaaatcaacggcacgcttcggcacaattttccactgcgttagccgggttaaaatcggggtgtcagcgccgacggcggaatcgtacacgccgcgaatgcagatagtttcctcaccatactggttaaactcggcgcgaggctcatacagcgtgcgcacctgcaaatcgtcacgacggacaaacgggccaccctgcgcattaacgtaaccagcccagtcaccggcgtcagcggcatcatgaacggcggcaaactcaacgcttaaaccgtgcgcggtctcggtatcagcgagacgacgcaactcacggtagaccgtcaccggcgcaccaccaataaactgaaactgacggatgtgccagcgcgccgcccatgctgaaacggcgggggctgtctctttcagcagctcaccgctttcgtcatcggtttcaccatcgagagcataaccgtcgatatttttcgaaatgtatttagcaacatagccggtagcgctgcccttttctgggtcaatggcctcggcatgaaagcgcgcttttttggctttatcacttctcagttcgtggcggtcttcctcccatgcataatcacggatgataaggcgcacgcgctcgacgtcctccggcaacatgaacataagcatgtgccagtgcggcgttccgtcgtgatgaggttcggcaacacggatgccgaaaatgcgtatttcttcccgatgcagcttggcgcgtatgcgcgcccaaaggccagttagatagctctgcgtgtccgatgggctggcaccattccatttgctgttacggtatcccgctttagtcgtggcgtgatatttagacggtgtagtcagggtgtaaaactccccgacataaccgagttcattgcagatattttcaaacccacggatgcgggtcatcagttcgcagcggcgtatcgcaggattagcgaccgaaccgtcgtatttttcaatcaggctgatgcggttgccgtcttcgtcttcgagatccagtcccttgagaaactcacgcgttcggcgcttctgttcgcgccagtctgttacgcagtttttactcgcgtaggcgtgctttttcttgctgacgttgccgactgcaatttgtaggtgttcgcgccatgccgacgcgacacgacgcagacgattacgccaccatgactcagtgaacatacggattattgcaggggcgatatcatctttgttgaagtatttatttgctacgcgctcccaatggggaggggtgacattgaattgcagagaaataaaaccagcgtgcatgtaccaggtgtatagcgttttgagctcaccaaaacctgaatcatcaatatttcccagctcagaacgaatgaaattagcgatgtcacatgccagcaagtcaacatcggcgcgcgacatatcagggaggcggttatatctggcgacaagattaaccatgcgagatgccagatattgcatgagtcgggtgtcaaaatgtccaccgaaaacggcggttgatacattagtgttgatacccgcgctctcatatttttttgcgaccagctcaagacgcggcaatgcctttttgcagaaactgattaaaaaagcattggctcgttgactgctctgattttgctccagcaccgccgcagtgcgataaacgtcaaaacgtacgcactctggctggagagaaagtaccttttttgcatgcagcaaagccgcgaacatacggtcgcggcgatactgttggtcataggtaagatatgggctggctattgccgaccgtggagcattccacggataagcgaattgaaccgccaagtcataccccccgaaaatgtttagatttcaattcggtgacctcctgacaggtcacgcaaaaggccacacccggaatcgcaatgcggcgagcttccgggattggttcgtcacattcttcgcagagaaaacgggaaggtgaggcgatacggctacgcgcgttgctgatgtggcgttcgcggtcttcctgctcgcgcagttgtgctaaatccattgcgtcggccattagtgcagctcctgtgattcattctcaaagcgagtggcttcacggcgcagcagttcggcggcttcggtacagctcatcccctctttgatgatatgtatcgccagtgcctcaagacggattgaaacagcgagcgcgcggtctttacgctcttcttttttggcatcagtcagcaatatggccagcgcatcgctatctgtattaaaactacgggttacggtattatgcataatttattctcctgatttcgggcaataagaagcccggcgggtttacgccattaaatttctgtttggattaattcggcattgttagccgttttggaaataagctcaccactgcgcgaaaatgattcatcgctgtaataagcgcttttttctcgtcagtagtcagctcacttaattggagctcatgacgagccgcagggatttttgccagaaagaaaatagcggccagcgcccgattattttcttcaaattgtgggtcacgtttatcacgcatatcatcgacaaaacgttcaacctctttccagctatcgccccaatatcttgcgcgcaattcagccacatgattgagaccggccagacgttcacccgcttttagcggaacagtcgcggaaacagcttcgatagccatgattccccctgcttttgagtagagagaccagccagtaaatcagcctgtgagttgctcgggtgccagcgcttgccgtccttacctgcgatccagccgtggccgtagtgcatgccgggactttgctttttaagcagagacgcgaatgacggttcattattcaacataagcacctcacatcagaccgaatgaggcaccgaggccgctcatggtgtctacaacgcttgtcattgccgggttagcctgaagccgcgcatgcagcgccagagccgacaatgacaacatgcgaatgccagcatttacgctttcaatcatgttgtgcttacgtgcagaggtcaggcgctcattagagaccgcaccgcttgccagctcgccgagttcactcattgctcgcatgacataagactgcaatttgtctttagccagctcatttaccggcacgcacggtagacagtgaatctgcgcaagaaagccatcaacgagggttgagtcttctgtcaggtcagtcagcagccacaattcaggcggcgtgaactggtgaggctgttccgggttgagcttgttgcgtaacgtctgaacattcatacccgcacgctcggccagcttcgccatgttgtgacgttgcgcaaaagcccggcatgcttcgtcatagtggggatgtttggaaacctgaaaatcaaacatgttgcatccttacaattcacataaagtgaattaagcgccgatgacgagttgaaaacgggaatgacccaacgccttacgcaactgctcttctttccagcgtgcgtaataaatgcgaatcgggccacctgctttcttgcagcctttacggatggtgcgtggttcgattggtacacaagggttatcgccggttgtccagcggtaggcggtgcgttcagaaacaccctcaagctctgcgaattgttgcaaagtaacgattggtgcgggaactttgatgattgcgatttcagaagccatgttgcatgattccccttttactaaagattgcaattaatagccatctgtttgccaacgttcgccattaattgcctaggtttaggcttaacataactcccaaaatggagcttgtaaataggttaaagctacatgagaattgaaggtcttggtttaaacaatgaagaagtgctggacaggatttgcgaggcttacggattttctcagaaaattcaattagctagacacttcgaaattgcatcaagctctcttgctaacaggtacagtcgcgattccatttcttatgactttattgtgcattgcgccctagaaactggcgcaaatctcgcttggctactcacaggcaaagggtcacctacaaccggcaatatgaataccgacacccaaaatgtggagaaattcacattaagtgaagagtctctggttagtgatggcgatttgagtattgctggcaagttctttagcaagccgcttacgaatccaattgccgtctacgctgacggaaaactccatttcatcgagcgagacgcatccctatcagatggagaatggctcgtcgatattgaaggtgctattagcattcgagaattaacaaaattgccaggcagaagactacatgtagcagggggcaaggttcccttcgaatgtggatttgatgacattaaagcattaggtcgcgtgatgggtgtatacagcgaggttaactaatgaccgtgcgtaaaaatccaactggcggttggatttgtgagctctacccaaacggtgcaaaaggcaaacgcatcagaaagaaattcgctactaagggcgaggctctggcgtttgaacagtacaccgttcaaaacccgtggcaggaagaaaaggaagacaggcgcacgttaaaagagctggttgactcatggtatagcgctcatggcattacactgaaagatggcttgaaacgtcagttagccatgcaccatgcttttgagtgtatgggcgagccactcgcacgcgatttcgatgcgcagatgttttcccgctaccgagaaaaacggttaaagggtgagtatgcccgctcaaacagagtgaaagaggtatcacctcgcacgctaaatcttgagctagcctacttccgggcagtgttcaatgagctgaaccgcctcggagaatggaagggggaaaacccacttaaaaatatgcgcccattccgcacagaagaaatggaaatggcctggctaactcaggaccaaatttcgcaactgctcggtgagtgtaaacggcatgaacaccctgatttagagaccgtggtaagaatctgtctcgccactggcgcacgttggtctgaggccgagagtctgaggaaaagccaacttgctaaatacaaaatcacatacaccaacacgaaaggaagaaaaaaccgcaccgttccaatcagtaaagagctctatgagactctgccagatgataaaaaaggccggttgtttagtgactgttatggcgcattccggtcggcgctggaaaggacaggtatagaattaccgccgggacaacttacccacgttttacgccacaccttcgctagccactttatgatgaatggcggtaatattttggtgttgcagcgcgtactcggtcataccgatatcaaaatgacaatgcgatatgctcactttgcaccagatcatttagaagatgtactaagatataacccattctctaataaggctctaaaatgaaattaaagaaactattagaattagatttcatggttaaattcaaatccacattggaaacagaatttgaaaaagagctatttatagcaagccttcgaaattatgcctctcatggtaaccctctgagatttcacaactttgcatatactatgagagagttaattttacatgttatagctcgaaaagctcctgaagaaaaagttatcggtgcaccatggtatgtacgtatagatcctaatagaaaagtaacaaggaaacagcagttaaaatattgtgcccaaaaaaacataccagatagttttctaggcgttatcaatactacatttattgatgattccatatcagatttcttagctgagtttgttaaccttaataaatacacacatataacagaaaaatattttaaaccatcccccaagcagttttttgaaaacgcacgggatgtagtttccatcgctcagcactgtttagatttgatggccgatactgctaaggaagtaatctgtatcctagaaaatgaaatcgatagctcagttagggatttggcgaacgagagtttgccagatgaagtgactattttagctcctcgagtttacactgagtatgtacaaattgaagatgtgtatgcctctgatattgatgatgaattcatatacataggtgttgacggttcagtatttgttacacaagaatatggtcccaaagatgacctatgcgaaattaacactgattatccatttagcctttccatgcagtgcagtttgcgcaatccagctcaactaactataacttcgaaggaaatagaagtagatacttcctcttggtacgagtaagaaaacagagtggcgataaagtggcggtagaaatggcgaataatgggtaatttttggcaaacagtggcaatctatgtcaatgataaataaagcaaagtattgattttcggttgttactgtaggaactcataatcgcttggtcgttggttcaaacccaacaggggccaccaaattttagctttaaaatcatataattaagccactcgaaagagtggcttttttgttcctgaattttaaaatggcaccacaaaccgctgagcagcgcgcatggcttagcgtgttgtcgctatcccattaagaggataaaaagtccgttataacgcagggaaaatttgcgcttacgctaaaacagatagcattctgccttagcaaaatattgctcagagcatctcgggcagcccataaccgccgcactcctgttgacttctgtctaactacgcaacgtagtcttgaaatatctttcattcctgcaatgctggaattcatactactcacgataaatgtaacaacacaggtcaatttccgaaaaataaccatagcctgcgccagctgatcgaaatcaacgcgttcctccccccgctcttatatataacccgctgacttacaaaaaggatgaaatgatgaaaatacgggatatatcaatcagtacctgtctggcactgttattaatgaattgcgtagctaaaccacccatgacgacggaaaatgaaagaggccgccgcgtttgcttttaatgtcgatgcttcgcaggtgtcaatttccgatgcgaggcagcaggatgtgaaaaccaactttgtagtcaccatcggcaaaaccagccatcgctgctatgtgacgaaggccgccgagccgaagctttacaggctgatcccgctgggcggcggtagcaccgtctcggatgccatctgcgccggcgccaacccgacgctagcgagcaaaacctgcgacgccctgtcgcaaaaagcgggccgctgctgagcctttgcgcagaagaaggccgctaactgcgcatttagtcactttttctgccgttttaccgcggtcgcttagttcagcgaccgcacctgctgataagaattgagccgttcccgcagcgaggtgagccagacatccggctcctgacggcagatttcggtgaggatcggcgtcagcaccagctcggcttcatggaagtcggtccactccggcggctccagtgaaaaaggatcgttcatcagccaaatcaccatcggcgtccaggcgcgcggatccagttgcagataatcctgacagcgcatcatatctcgggtccgcgcctcatcggggacgacatcctttcccaccgcggcgcaactcattgccagtactgttattcctgccatcagatgtttccaaacccattttcgccagaaggcgcgtttttctttcgccattgttattattttacctgccagttgtcgccggacgatattcccgagagctcaccttaataagagcagattaatcgtttgcattttttttaacagcagaccgcgctgaagcaagtgaacgcccgttcctacagctgtcatccagctatgcaaatatattcgtctggctcagctccacaatatttccctggcccaaaacgatttgtgttacaattacgccttataacggcatcgataaaaataacccccgccgcacctgcaccaggcatcgcccttcttttttcatatcaggatttacgcccccatgaatgcgataatcattgacgatcatccattggcacgtatcgccattcgcaaccttctcgacagcaacggtattaccgtcgcggcagagctcgacagcggcgctcatgccgtgcagaccgcggaaagcatgcagcctgacctgctcatcgtcgacgtcgatattccagagctcagcggtatcgaggtgctggagcagctgcgcaaacgccgctaccagggaacaatcatcatcatttccgctaagaatgaactgttctacggcaaacgcagcgccgactgcggagcaaatggttttgtgagtaaaaaagagggaatgaataatatcctcgccgcaatcgacgcagccaataatggctacagctatttccccttttcactggaacgcttctgcacccacggcatcaccgatcaggaccggctggatacgctgtcaacgcaggagatgaaggtgttccgctatattctcagcggcgtcgactacaccaccatcggcagcaaaatgaatatcagcaataaaacggtaagtacctataaggtccgtctgatggataaattaggctgcagcaccctgcttgagctatatgactttgcgcaacgcaataaaatagggtgatggcatggcggttcgtcttattttatccgtcgttgtcgggctgacgctgagcctctcgcctgccgcgtatgccatgaaacagctggagctgaagagccattctcatatcgcggcgatcgatatcccgcttagcggtaaggagaaagcatggctggcggcgcagccgacgctgaccgtcgggacctggcttcccgagaggacacctatcgtctatgacggcgacgagaaaagttatcagggcattaacgccgactatctggcgctgatggcgcacagcctcggactgaaggtgattatccgccagtatgacaccgagcagcaggcgctcaccgccctggccgaccgccaggtggataccctgctcactcaggtggcgcaccgggatgccctcgccccgggcctggatcaatccgcgccgctgcttaaaacctggccgacgctggtcacctcgctgaaatcccctctgccgccgctgaccactgaccgccgcgtcacgctggcctgcacccgcgattgcgcttttttcgatattattcagcaggcgtttcccaacgccaaaatcaccctttatgatagcgactatcaggctctcgcctcggtggtcagcggcgagaatcagtattttatcggcaacaacatcaccactggccactgcatctcgaaatatttctcgcaatcgctggttatcgcgcactattttcgtcagcaggagcaacacaaccgctttgtcacccgtgacgatcggccagagctgcatcaactcttcgaccgttttatccatgccgtcgacagcgacaccgcgatgcggatcatgcaaaactggctcaaccgtggcgatctgtcgtttctcaataccccgcttacctttagccccgaagagcagcgctggctgcagaagtatcgtcgcgtccgcctgctggtgaacccctattttccgccatttaccctggtggataacgaggatgaactgcgcggcatcatggccgatatgctgaatattgtctcactccagaccggcctgcagtttgaccctattctggtgcgcaaccgtcaggctctggcaaagcgcatggaaaaagaggactgggcgatcatgcccgccgccaccctgaccccacagccgcaggcctacgtcaccctcagcgatccgcttattaacgtggcctttgtgctggtcgcccgcggcagcgcccccgaccagcatctgctgacgcgctcggcacggatcgccctgccggtcgggcctatcgccgcccatgatctgaaagcgcgttttccgctgattaactgggtggaaacggataatgttggcgtcgccatgaagatggtagaggaaggcgaagtggatgccgccgtagcctcggagctttccgcccgctatatgatcgaccactactatccacagggtctgcactacacccgcattgatggactccccgtcgcggccattcggctggccatcccgcgcgatgaaccggtgctggccgccattcttaacaaagcgctgcaggttattccgccacgggatattctgcagatgaccgagaagtggtcgaaaatctccagtcagcaaatagagaactggagccagtacagccgccagttttaccagctgatcgcctttgcgctggtgctgatcgccatcagcctcggctggggactctccctgtgtcgggaagtgcgcaaacgtaaagactcccagcagcggctcgaggaggagctggcgcagaaggaggccctctcctgtgcgctggagcgcgaaaaagacaaagcgattcaggcgacaaaagccaagagccgctttctggccagcatgagccacgagctgcgcacgccggtgagcgccatcgtcggctttctggagctgctggcgaaacctgagctgaacgtcggccagcgtaaagaggcgatcgagctggcggggtcgacggcgcaaaccctgctgggacttatcggcaatattcttgatatcgacaagattgaatcgggaaaataccaggttaccccgcagtggagcgatgtcgcacagttagtgtcgcagcagtgtcataccttcgacgcgctggcgcagcaaaagggcatcgatctgcactaccataacgcgctgcaggaagggaccatgctgtgggtcgacccgcaggcgctacggcaaatcctcaataatctcatcggcaatgcgctgaagtttaccgtcgaaggcgcaattcaggtctcctgccggctgacgctggcgaatgagacacagggagagctggccctcatggttagcgacagcggctgcgggatcagtgaagcagagcaggccaccctcttccaccgctatgcccaggcgcgccagggacgccagcagaccggctccggactggggctggtcatttgcaaagagctggttgcgctgatgcagggtcgcctggagatggtcagccgtccgggcgtggggaccactttcaccatcacgctgccggtcaaggcgagccgctgcgcgatccacgcgccgcagtcgtcgcccgccagaccgcaggctctacccgggctggcgatactgatagcggacgatcaccccaccaaccggctactgctcaagcgccagctcagcactatcggctatagcgtcgatgaagcctgcgacggtgaagaggcagagaataagctcgccagcaaacattacgatctgctgataacggacctcaatatgccgaagaaagatggcctggcgctggcggcctcgctacgccgtcgctatccgggcctggtaatttggggcgtgactgccagcgcactgccgcagtcgcgggaggcgtgtctggccagcggcatgaatatgtgtctgtttaagccggtgtcggtccagacgctgagtcatgagctcagccgtttagcggtgggccgcgcatcacctcacgctacccggcacctgaagctcagcgtgctgagcgagaatacggggggagaccaggcgctgatgaatgagatgctggagacgttccgcgatgcgtcggccgcggatttacaggctgccggacaagcaatcgcccggcatgagccgcagatctttctgcgggcgctgcaccgtctgcacggttcagcacaaattctggggattactgcgctacaacaactgtgcgccccttttgaggcaaagcggcctgattcgctgacgccggcaagctgtctggaggtggtacagcgcatcaccggcgtcatgcgcgagatcgatggcgaaatcgacgccctgatcggccgctagccgttccgctcgggcagtccgcctgcccgagcgttaaggggacatccttgtcagttttttcctctgcgctctctcagggtggaacaagtatcagttgcctgccaccagcatctcgctatccaccacaatgccctcttcagcgcccttcagcaccagattcgcttcgtaatatttaccggctttcagcagttcttgcgactgcgctaccgccttacgggtctggttaagcggcatcagatactggttctcaatcacgccaataccggccaggcgcagggtatcgatagcccctttctgatcgcctttcgccagcttttcgttggcggattggatagcgctctctttttccggcgtggccacatagtcttcagacagggcgatagaggcgttaatgatcacatagcgatcggcgatcattttggctttagcatcagttttcacaaacttcgcccaactggcatcatcggcggccagcagcgcggcggcgtcgtctgtcagttttttggcgctatccggctggccatggaacagcgccagacgggcgaactggatgtcgcgcatcgcattcgcgccctgcaccgccacctgcagcacatcggcggcttctttctgtacctgcgtcgtggctgccgcggctggcgctgccgtcgcgctatctgttgcccataccggagaggtactcatcatggttgccagcaggctcgccagaatgacttttttcatcgttgactcctgattaaaatcggtaagcatcaccaaacgcagccagcttaaaaaatatcgcgggcattgagaatcagagcccggaagtaatattgcgggcctggtctgacagctgtcagaccaggcgtataaagtgacctcggcgctcttatttacgcctgccgatcgcgcggcctactattttcctcagacctttcttttggcccgctgaataaaccctcacgctttttattcagcgtcaggccgccaaccgggatctgcggagcaattatgtttatgtttagccattacaccttaaatgcgtttagcccacgcgtcttcattcgatataaacggcatgcctgcctgatggcggtattgctgtttatctgcggagcctgttgtctggcctggccgttggtcgccggctggtatctcgccacagtaaccggcatgttattgatgatctgcggcttctattcgctgtacagcctgattgtcttccgccagcagcactggaaatcacgcctggtggcgctgatcttcgccatcgcctggatcgtgctcggcctgagctttgtcgtcaatcccctcaacggtatgagcagtctggccattttatttggctttttatttgttctcggcggtatttcccgcatcgttaacggatgtcaaacccgcaaacaaagcggcgctggctggaatatttttatcggcctgttggatttacttatcgcctgcctgtggctggccatgaacccgcagcaaagctggttatttattaccgcctttatcggcgttgaaatgatatttagcgccatcggcttgttggtcctgcgcaataaaatgaagcacgctgaggcttaagccctattttgacactggagaagaaaatgaatttacctaaagcactcgtattgaccgtggcggctaccacattctgtctgatgaccagcccggcgttcgcggttgaggaaaccacgccgcagaatatgacctgtcaggaatttatggatatgaacccaaaaagcatgaccccggtggccttctgggtagtgaatcgcaacaccgactttagcggcggcgactatgttgactggcatgaagttgagaccgtttcggtaccgaaaatgctgcaggagtgccacaagaaccccgcagctaaacttggcgatctcagcgcggtcatcaaaaaataacccccccggcatcaggccggggaaacccgccgcgctgcggcgggtcctgctttactcatcgataccgcattcgcacggcagatggcggccgataagcttgcgatacaaaaacgccccgataatcgcccccaccaccggcgccagcagcggcaccagaaagtaagggatcgccagcccaccggtaaaggcgatcgagccccacccggccagactggtaaacagttttgggccgaagtcgcgcgccggattcagcgcaaagccggttagcggccccatcgacgcgccgagcacggcgatcagcaagccaatcagcaacggcgccagcggcccgcgcggaattccgttgccgtcgtcggtcagggccatgatcatcgccatcaggattgccgtgatggtggtctccacggcaaacgcttgtataaaagtgatatgtggatgcgggtacgtggaaaagaccccggccaggttaagactggcggcagtgccgcgcacgatatgctgactctgttcaagatcgagaaacagctggcgatagagcccatacaccagcgcggcggcgcagaaggccccggccgtctgggcaacaataaacggcagcaccttgcggcgttcaaaacaggcgaacagccacagggcaatggtcaccgccggatttaggtgcgcgccggagacaccggccgtcaggtagatggccatggcgacgccaaggccccagataatactgatctcccactgaccaaagctggccccggcgacccgcagcgcagcgacgcagcccgcgccgaagaaaatgagcaatccggtgccaagaaactcggccacgcactgcccggttaaggtagaagtctggttcattatcggcatcctgaaatagcacgttaaagagagaggctggcgcgagcgcccgtttaattcgcctgaccggccagtagcagcccggtggcgaccgcattgcgcggcccttctgttccccgaatattgccctgcccggcgaccacgccatagtgcgacaaggcttccgtgataagctgcgggatctcaaagtccagcgatgagccgcccaccagcaccacaaaggcgatatcgcgaatggaaccgccgggtgagacctggcgcagcgcgcgcaggcagttggtgacaaacactttctctttcgcctgccggcgcacgagacgaattttttccagcgggctggcgttatcgatcggcaccagttcgccctccttgatgtacaccactttggcgaacaccgccgggctgagggcttcccgaaagaactccaccgcgccattctcgtgacgaatactgaacaggctttccactttggccagcgggtatttttttatcgcttccgccagcgaaagatcctcgaggcccagctcggttttaatcaacaggctgaccatattccccgccccggcgagatggaccgccgttatctgcccctccgcgttgacgatcgccgcatccgtcgagccggcgccgaggtcgaggatcgccagcggcgccgcacagccgggagtggttaacgccccggcgatggccatgttggcctccacgccgcccaccaccacctcggtctgcagtcgggcgctcagttcgcgggcgataacctgcatttgcagacgatccgctttcaccatcgccgccatcccgacggcattctccatggcgcactcgccggccatcccgccctgcaccttgcgcggaataaacgtatccaccgccagcagatcctggatgtatatcgcgctcatctcatggccggtcagggacgccattaccttgcgcacccgctcaagcatgccgccggcgtgggtgcccggttcgccgcggatgtcgcgtaccggagcgcaggcgctcatcgcctgcatgatggcttccgcgccctcggcgacatcggcctctccgcggcgcttttcgccgctaatgtagaggttgcccgccgggatcacccgcgactgcacatccccctgcggggtcttgagcaccaccgctgaacggttgccaatcagggcgcgggcgatggggacgatggcctgggtctcttccgggcttagcccgaagaaggtggcgatcccgtagggattcgacaggatccgcaccacctggcccggcgcggccacttccaccgccgccattaccccctcggggacctgctccagcagcgtcacttcatccaccaccggcagggttttacgcaggcggttgttcaccagcacgccgtcgtcctttttgaggatcgccgccaccacgttgatcccccggtcgagcgcctcattgagccaccacacggcgtcaaggaaatcgacggcgtcgtcaatcagtacgatccacccctcggcatactgcgccgccggcagcgtcgccagccgcccgagggcgatagtcgtccccacgccaacgcccaccccgcccggcgtctgcgggttatgaccgatcatggtcgattcggtgataatggtctcggtgatggtctccatcgccacatcgccaatcaccggcgcggcttcgttaagatagatgcgagagacatcgctcatcgaccacggtgttttcgccagggcctgctccagcgcggcgagggtcccggcgatattgtcccgcgtccctttcatgcccgtcgtcgcgacgatcccgctggcaacaaacgccctcgcctgcgggtcatcggacgccagcgccacctcggtggtggcgttgccgatatcaatcccggctattaacggcatgctgacctccgcttagcttcctttacgcagcttatgccgctgctgatacacttccgccgactcccggacaaaggcggcattcactgtcgcatgccaggtgtgctccagctcgtcggcgatcgccagcagctccgcctgcgaggagcggaacgggcgcagcgcgttatagatagccagaatgcgctcgtcaggaatggcgataagctccgccgcgcggcggaaattgcgcgccaccgcatggcgctgcatctgctcggcaatctgcgcctggtactcaagggtctggcgggagatccgcacatcctgcgggcccacctcgccagagagcaccttctcgagggtaatatcggtcaatggtttgccggtaggcgtcaggatatgctccgggcagcgggtggctaacggataatcctgcacgcgcatggttttctcgctcatggtcactcccttactaagtcgacgtgcagggtgacgggctcggcgtcctgcaccacatgtttggtctctttgatatgaaatagcgcggctttggccataaatttcggccgcaccatctgatcgttcaccaccggcaccggcgaaggtgactctttgcgcgcatagcgcgcggcgtttttgccaatctgccggtaggtctccagcgtcagcagcggcgcctgggagaacagctccaggttgctgagcggcagcagatcgcgctgatggatgaccgtggtccccttcgactggataccgatgccgatccccgagccgctcaggttggccgcatcccaggccataaaggagacgtcggacgtgcgcagaatgcgcaccacccgggcgtgaagcccctcttcttccaccccggcaatcagctctttgaggatcgcgccatggggcatatcgatcagagtgtgatgctggtgtttatcgaaggcagggccgacgccgatcaccacttcatcggcacgttcatcggcagaagctaccccgccctcgcgggttttcagggtaaaagagggctgaatttgagttgtctgttgcacaggaataccgccttattcaatggtgtcaggctgaaccacgcccggaatatttttgatctccgcccagcgttcggcagagatgcgatagccggtgcccggcccctgatagtcattgatgtcgttgaccgcgctcaccacctcgaactgtcgatcgagaatggccgaggtctgcaggtaatcgccggtgacccgctggcgcagcatattgagaatattgctggcgatatcctcaaagccgctgcggctcagcgcgccgacaatatcgaggccggtgatgttgcgcttcatcatctcttccaccgcactcagatcctccaccacgttacgcggcggcatctcgttgctgccgtgcgcgtaggtggcggcctccacctcctcgtcggcgattggcggcagccccagctcgcggaaaaccgcctggatcgcccgcgccgctttctggcgaatggcaatggtttccgcctcggtcaccggacgcaggccgccgtcaaccatcaggtcacgctgcagaatgttgtaatcatcaaaatcttccgcatcgaagttcgagccggcgaacatgttgtcgtagttcggcaccgcgctgtagccggagaaaataaagtcggtgcccggcagcatctgcatcagggtgcgcgcggtgcggcgaatatccgagtgggagaaagtctggtcgttggcggacgccacttcgaggtcgagcatagaggcgatcaggttttccgccagcaccgcccgaatgcccgacggcacagcgccggtcatgccgatacagctcactgcgccgttttgcagcccctgaaccccggcgcctttggtaatgaagatgcagcgcgattcgaggtagagcatcgacttgctctccgaatagcccatcagcgcttcggatccggtgccggaggtgtagcgcattttcaacccgcgggaggcgtaggccgaggcgaggaacgcctttgaccacggagtatcatcgccgtcggtaaataccgcttcagtgccgtagaccgacaccgtctcggcgtagctggttaagccacgcatgcccagctccagctcggtggcctcttccaccgagcactgcgtcaacacgccgggacggccgcactgcgagccgaccaacagcgccagggcgttaaacggcgcatagcgcgcgataccgaccgtggtctcctgttctgagaagccgcggatcccggcctcggcggcgtcagcggcaatctgcaccggattatctttgagattggtgacgtggcactggttggagggggtccggcgggcacgcatcttctgcagcgccatcatcatctccaccacgttcatctgcgccatcacctcgaccgctttggccggcgtgatggcggtagtgatggcaatgatctcctcccggctgacgtgaatatccaccagcatgcgggctatttccaccgcctccaggcgcattgcctgctctgtgcgctcaacgttgatcgcgtaatcggcgataaaccggtcgatcatgtcaaactggtcccggcgtttgccgtccagctcgacgatcagaccgttgtccacttttactgaagagaccgggtcaaaggggctgtccatggcgatcagcccctcttcaggccactcgccaatcagcccgtcctgattgacggggcgctgggccagtactgcaaatcgttttgatcttttcattgttcatcggctcaaaaggtgaaatccgcagacggtagcgaatacgccgggccagcgtcgttgccgcccggccattaccggcaatagcggaactttaaatgagccagtggtgaaaaaaataaatttaatttcgtttcaatttggcacacgaaatctaccgacagtttcactatgaaactttactccggcggcaaaaataaaaaatgtgatcgcccgcaatgatataaatcaattaataaaaaacgcccttaattacgttttgccgacgctattttaaccctattgactaaatcatggcgggtgacaaaataacgctgacaaaaataaagcaagccaaccgaatggtaatagttttttactatcgccccctactgactattcgcgccagcgttatcctggtgcgggagagaatgatgaacaagagccaacaagttcagacaatcaccctggctgccgcccagcaaatggcggaggcggtggaaaaaaaagccgctgagatcaacgtggcggtggtgttttccgtggttgaccacggaggcaacacgctgcttattcagcggatggacgaggccttcgtctccagctgcgatatttccctgaataaagcctggagcgcctgcagcctgaagcaaggtacccatgaaattacgtcagcggtccagccaggacaatctctgtacggtctgcagctaaccaaccaacagcgaattattatttttggcggcggcctgccagttatttttaatgagcaggtaattggcgccgtcggcgttagcggcggtacggtcgagcaggatcaattattagcccagtgcgccctggattgtttttccgcattataacctgaagcgagaaggtatattatgagctatcgtatgtttgattatctggtgccaaacgttaacttttttggccccaacgccatttccgtagtcggcgaacgctgccagctgctgggggggaaaaaagccctgctggtcaccgacaaaggcctgcgggcaattaaagatggcgcggtggacaaaaccctgcattatctgcgggaggccgggatcgaggtggcgatctttgacggcgtcgagccgaacccgaaagacaccaacgtgcgcgacggcctcgccgtgtttcgccgcgaacagtgcgacatcatcgtcaccgtgggcggcggcagcccgcacgattgcggcaaaggcatcggcatcgccgccacccatgagggcgatctgtaccagtatgccggaatcgagaccctgaccaacccgctgccgcctatcgtcgcggtcaataccaccgccggcaccgccagcgaggtcacccgccactgcgtcctgaccaacaccgaaaccaaagtgaagtttgtgatcgtcagctggcgcaacctgccgtcggtctctatcaacgatccactgctgatgatcggtaaaccggccgccctgaccgcggcgaccgggatggatgccctgacccacgccgtagaggcctatatctccaaagacgctaacccggtgacggacgccgccgccatgcaggcgatccgcctcatcgcccgcaacctgcgccaggccgtggccctcggcagcaatctgcaggcgcgggaaaacatggcctatgcttctctgctggccgggatggctttcaataacgccaacctcggctacgtgcacgccatggcgcaccagctgggcggcctgtacgacatgccgcacggcgtggccaacgctgtcctgctgccgcatgtggcgcgctacaacctgatcgccaacccggagaaattcgccgatattgctgaactgatgggcgaaaatatcaccggactgtccactctcgacgcggcggaaaaagccatcgccgctatcacgcgtctgtcgatggatatcggtattccgcagcatctgcgcgatctgggggtaaaagaggccgacttcccctacatggcggagatggctctgaaagacggcaatgcgttctcgaacccgcgtaaaggcaacgagcaggagattgccgcgattttccgccaggcattctgactgttaacgagggggccgtcatgtcgctttcaccgccaggcgtacgcctgttttacgatccgcgcgggcaccatgccggcgccatcaatgagctgtgctgggggctggaggagcagggggtcccctgccagaccataacctatgacggaggcggtgacgccgctgcgctgggcgccctggcggccagaagctcgcccctgcgggtgggtatcgggctcagcgcgtccggcgagatagccctcactcatgcccagctgccggcggacgcgccgctggctaccggacacgtcaccgatagcgacgatcatctgcgtacgctcggcgccaacgccgggcagctggttaaagtcctgccgttaagtgagagaaactgaatgtatcgtatctatacccgcaccggggataaaggcaccaccgccctgtacggcggcagccgcatcgagaaagaccatattcgcgtcgaggcctacggcaccgtcgatgaactgatatcccaactgggcgtctgctacgccacaacccgcgacgccgggctgcgggaaagcctgcaccatattcagcagacgctgttcgtgctgggggctgaactggccagcgatgcgcggggcctgacccgcctgagccagacggtcggcgaagaggagatcaccgccctggagcggcttatcgaccgcaatatggccgagagcggcccgttaaaacagttcgtgatcccggggaggaatctcgcctctgcccagctgcacgtggcgcgcacccagtcccgtcggctcgaacgcctgctgacggccatggaccgcgcgcatccgctgcgcgacgcgctcaaacgctacagcaatcgcctgtcggatgccctgttcgccatggcgcgtatcgaggagactaggcctgatgcttgcgcttgaactggctggcgtcaatatcgtactgcttcattttgcgccacagggtggtgcggccgatattgagcagctgcgacatctcctgcacccgcccgctggtcacccgggcggcgtgaataatagcttccttttcgatggcgctaaaggtcaggctggccggcagcagcgatgacgcgctatccccgcccggccgctcggaaaagagatattccggcagattactcaggcgaatgtggccgttgtcgctgctgatggcgatattctcaatgacgctgttgagctcaaaatcattccccggccacgagtaggccaccagctgcgccagcgcgtcatcgtccactttcagtcgcgaagagaaacgcttctccaggctcttcaaccggttatgcaccagcgacggaatactgttgcgtcgggcgcgcagcggcgggatgacgatctcaaaggagtgcagcgcatagtacagctggcggctaaagcggttctgttccaccagattggccagatcgacggtggtggtggcaatcaccttcacatccaccgggatcaggcgccgggcgtcgaggcgggtgagcacgccctgcttaatgacctgcagcagggccgactgcagctccggcgccagatactcgatcttttccagaaacagggtgccgccgttggccagctcaaggcggctcaggcgaccattttcatcgtcggtaggggcgctgcccataaagtcctggcccagcacgctgtcggcatatagctggcagttgacggcgatataggggccgcccgcccgttcgctttcattgtggatagcctggctcagcagctctttcccaaccccctcttcaccgcacagtagcaccgggaagccgccgcgcgccgcctggcggccaaagtggatcaggcgtcgggtttccggatcgtcggcagacatctgctcaaaggtgtggctgactttaccgagctggctggtcatcagctgccgcatctgctccaccggatgcagcagcagaataaaactgttgccttgcgcctcgacaatcggttttaaggtgatcaccgcgtcgacaaactgatgctgactttcaaaggtgacttcgacgtgattcaggccgcgggcgtgtttgatggcgcggcgcagcagcgccgggagggtcaccagatcggcgatatttttcccctggctggcctgagcatcaagatgcaacagtctcgccgcctgaacattgagaaactgcagcacgccctgttcgttccacgccatcaccccatcgtccatgctctccagcaggccgtacatctgattgaggtgacggttggattccgccagcaggctgtcggtaagcagggagttacccacctcgcgggcgatggccagcgtcagggagaggtcggcgctggactggtgctcgaccagacagcaaagcgagatagagccgaacagccgcccgtggttatcaaacaccggcgtcgagcaaaaactccatggctgtagcgcctgcttaaaatgccgatcgccggcggtgttgatcggctggccctgcatcgcggccagcgacagcgcgcaggtgccgataatgctctccgcgcagtagctgccgtcgcgaaatcccagggcagccagctgggccagggtttgcggctcgccgcaacggctcaggatgcaggcggactcatcaagaataaacagcgcgcaggggcggccgtccataaactcccaggcgtcttccagcgccgcctggccgatggtgagcagcgcggttttacgccgacagatggagtcgaaggtcaggccctgggcctggtgcggcgtttgccaggtttcgcgctgcataaacttgctgcagcggtgccatgactgggcgatgacggaagagaccgccttcccggtatcctgagtctgaacagtcatatccttttccgcgttgtaccatagagaacccctccggcagcgactgccggaggggagaaagaaaaaccgctgacctgggccagcggtttagccaccgcgaattaacgcgccagccactgctggcctaacagatcggcggtgaggatagcggcatggacgctctccggggtcaccgcaaacggcatattatggatggtttccccttccgcgcaggtagctttcgccaccgcggcgattttctcgtcgatcccctctttgacgcccatctgcgcgagcgtcaccggcaggccgacgcgctggcagaagcccagcaccgtttcaatctcgtccatcgggctgttctgcagcaccagctgcgccagggtaccgaaggccactttctcaccgtgatacaggtgatggcactcttcaagaatggtgaaaccgttgtggattgcatgggcagcggccaggccactgctttcaaagccaatgccgctgagataagtgttcgcctcgatgatgcgctccagcgcttcggtcactaccccggcctgcgccgccagacgggccttttcgccctccgccagcagcgtatcatagcacaggcgggcgaggctcagcgccgcctcggtggactgtcctccggccatgctggtggcgcgcgcatcgtagcaagctttggcctcgaaccaggtggagagcgcatcgcccatgccggagaccagcaggcgtaccggcgctttggcgataatcgccgtgtccatcaccaccatatccgggtttttcggatagatcagatactcttcaaactcgcccgcttcggtgtagatcaccgacagcgcgctggttggcgcatcggtcgaggcgatggtcgggatcaccaccaccggcagcttctggtagtaaccgatcgccttcgcggtatcgagagttttaccaccgccgatcccgaccacgccgcggcagccctgtttttgcaaaatcgccatcagacggttgatttccgcatggctgcattcaccgttaaaccgttccgcatggcagcgaatatcgtggctctgcaggccattcaccactttctctcccgccagcttcattacgaaatcgtcggcgatgacgaagaagctctccgccaggtttttggcatattgaccgaacagaacagcagcatcaggaccctgaagatatttggctggagattgaataacttttagcattcctttcaccctcaaataagtgcgcatgtaaacatgatgagccctggcgttatccgcgccggccagtgaagcgcggcctgaacggagcgtaccggagcagtgcgatcactgtagggccggcagggaacaaaaaaatctttcgcctttttgttctgatatgaaacacaggttaattttttacgttccatattggaacaaaaaaccctaatctctgtcaggattgcgatcccgatccgctcctttgccgcataatgcccttacaatcctccgtgtttgaccgccttttctcccgcagtcggcagaaaatcagcaaaaaattttttcccacccgcttcgccggctatcctgaccgccgcttatggcagaagaaaaaaagcgcgccagctcgcattttcaccatatcctcagcaaaaacgttccataaagaaacaaaatcaggaagcaatgtttcgtaatgaaacccgatcgtcgaggcattctttttttcgtccgctcagccagaatcatcatatcgccaggcacgctccaccgtcagacgatacccctacgcgatgaccgcctccgccagcagagaggcggcatcgaaccttctccaacggagcactgaataatgaaaaagctgattaaccgtgttgaagatgtactgaatgaacaattacaggggctggctaaagcccatccgcagctgaccctgcatcaggacccgctgtatgtgacccgcaccgacgcgccggtggctggcaaggtggccctgctctccggcggcggcagcggacatgaaccgatgcactgcggctatatcggccagggcatgctctccggcgcctgtccgggggaaatcttcacctcgccgacgccggacaaaatgtttgaatgcgcgatgcaaattgacggcggcgaaggcgtcttgctgattatcaaaaactataccggcgacatcctgaattttgagaccgccaccgagctgctgcatgagagcggcattaaagtcaccaccgtggtggtcgacgacgacgtggcggtgaaagacagcctctataccgccggtcgtcgcggcgttgccaacaccgtactgatcgaaaaactggtcggcgccgccgccgagcgcggcgactcgctggaagcctgcgctgaactgggccgccgcctgaacaatctcggccactcgattggtatcgccctcggcgcctgcaccgtaccggctgccgggcaaccctcctttacgctgaaagatgacgagatggagttcggcgtcggcattcacggcgagccgggcatcgaccgccgccgcttcagctcgctggaccaaaccgtcgatgagatgttcgataccctgctggaaaacggcgcttacagccgcacgctgcgccagtgggataccgtcaagggcgcgtggcaggaagtacagcagagcaaaaccgcgctgcaaaacggcgaccgggttatcgcgctggttaataacctcggcgccactccgctttccgaactgtatggcgtgtataaccgccttgcccagcgctgcgaagcgtccggcatcatcatcgaacgcaacctcatcggcagctactgtacttcgctggatatggcgggcttctccatcactctgctgaaagtggatgacgagacgctgacgctatgggacgccccggttcacaccccggcgctgaactggggaaactaaggagcacgacatgtcactgaacagaacgcaaatcgtcgactggctgtaccgctgcggcgatattttcaccaaagagagcgattttctcaccggcctcgataaagagattggcgacgccgaccacggtctcaatatgcaccgcggtttcagtaaagtggtcgaaaagctgccgtcgattgccgataaagatattggctttatcctcaaaaacaccggcatgacgctgctctccaacgtcggcggcgccagcggcccgctgttcggcaccttcttcattcgcgccgcgcaggtgacccaggcccaccagagcctgacgctcgacgagctgtacctgatgatccgcgaaggtgcggacggtgtcgtcaatcgcggcaaagcggagccaggggataaaaccatgtgcgacgtctggctgccggtggtggactccctgcgccagtccagcgagcagcacctgtcgatcgccgccgcgctggatgccgcctgcgaagtggccgagcgtgcggcccacgccaccatcactatgcaggcgcgtaaaggccgcgccagctatctcggcgagcgcagcatcggacatcaggatcccggcgcgacctcggtgctgtttatggttcagatgctggccgccgccgccaaagagtaaggaaattgcgatggtaaacctggttattgtttctcatagcgcccggctgggcgaaggtgtcggagaactggcccggcagatgttaatcaacgatggctgcaaactggcgatcgccgccgggatcgacgatcccgacagcccgatcggcaccgatccgcttaaagtcatggaggcgatcgaatccgtggccgataccgatcacgtgctggtgatgatggatatcggcagcgcgttgctcagcgccgaaaccgccctcgatctgctcgatccggcgattgccgcgaaggtgcgactgtgcgccgcgccgctggtggaagggacgctggcggccaccgtcagcgctgcctccggcgccgggatcgacaaggtgatcgccgacgccatgagcgccctggaggccaagcgggttcagctgggtttaccttcgccaacttctgacgccgcgccggcgccgatgcttgccgacgacggcgacacaaaatcggtgtcagtcattattaacaatcataacggcctgcacgtgcgtccggcgtcgaagctggtcgccgcgctggcgggctttaacgccgatctgctgctggagaaaaacgggaagtgcgtcaaaccggacagcctcaaccaaatcgcgctattgcaggtccgccgcaacgataagctgcgcctgctggcccgcggtccggatgccgacgcggcgctggcggcgtttcaggcgctggccgccgataacttcggtgaatcgcctgcggcgcaaccggcagcggctccggcaacgcccgagcgcgtcgaaggcgctgccctgcgctatccgctggccctgatccagccgctccgcccggctgccgccgatgccgcccgcgagcagcagcgcctgcgccaggccattgaccagacgctggcggatcttatcgccctgaccgagctggcggaaaataaatttcacgccgatatcgcggcgatcttcgccgggcaccacaccctgctcgacgatgacgatctgtttgatgccgccaacgatcgcctgctcaccgaacaatgcacggcggaatgggcatggcatcaggtgttgatggagctcagccagcagtatcgccagctggatgacccctacctgcaggcgcgctatatcgatatcgaagatattttgcagcgcaccctgcgccatctgcagggcgttcaggagagagtgccgacgcccggcgagccaacaattattattgccgacaacatttatccctcaaccgtcttacagctggatgccagcttcgttaaaggcctgtgcctgcgcgatggcagcgaacaggctcacggcgcgattatcgcccgcgcggcggggatcgcctggctgagccagcagggcgaggcgctgaacagcgtgcagcccggcgagactatcgtgctcgatatgcgccaccagcgccttatccgtgactaaaattcacgttgaccgttaccgctccgggggcctgcctccggagggtgagttttcgcttactcttcaggaaccactatgtctcaattcttttttaaccagcgcgccagcctcgtcaacgatgtgattgagggtaccattatcgccagcccgtggaataacctcgcccgtctggagagcgacccggcgatccgggtggtggtccgtcgcgatctgaataaaaacaacgtggcggtgatctccggcggcggcgccggccatgaaccggcgcacgtcggctttattggtaaaggcatgctgaccgccgcggtctgcggcgatctgttcgcctcgccgagcgtcgacgcggtgctcaccgccattcaggcagtgaccggcgaggcgggctgcctgctgatcgtcaaaaactacaccggcgatcggcttaacttcggtctggcggcggagaaagcgcgccgactcggctacaacgtggagatgctgatcgtcggcgacgatatttcgctgccggataacaaacagccgcgcggcatcgccgggaccattctggtgcataaagtggcgggctatttcgccgagcgcggcttcaacctcgccaccgtcctgcgtgaagcgcaatacgccgccagccataccgccagcatcggggtggcgctggccagctgccacctgccgcaggaagccgacagcgcgccgcgccatcaggccggtcacgccgagctgggaatgggcatccacggagagccaggcgcctcgacgatcgccacgcaaaacagtgcggaaatcgttaacctgatggtggaaaaactgaccgccgccctaccggaaaccggccgcctggcggtgatgctcaataacctcggcggcgtgtcggtggctgagatggcgatcctgacccgcgagctggccaacaccccgctgcaggcgcgcattgactggttaataggcccggcctcgctggtgacggcgctggatatgaaaggcttctcgctgaccgccatcgtgctggaggagagtattgagaaagcgctgctttcggatgtggaaaccgccagctggcagaagccggtgcagccgcggactatcaacgccgtgccgtccaccctcgacagcgcccgggtggattttacaccctcggccaacccacaggtgggcgattacgtggcgcaggtgaccggcgccctcatcgatcttgaagaacatctcaacgcgctggatgccaaagtaggcgacggcgataccggctccacctttgccgccggggcgcgcgagattgccgagcggctcgagcgtcagcagctgccgctgaacgatctgccaacgctcttcgcgctgatcggcgaacgcctgacggtggtgatgggcggctccagcggggtattgatgtctatcttcttcaccgctgccgggcagaagctggggcaaggcgccagcgtggccgaggcgctgaacgccggtctggaacagatgaagttttacggcggcgccgatgagggagaccggacgatgatcgacgctctgcagccggccctggcggcgctgctggccgaaccggagaatctgcaggccgctttcgccgcggcgcaggccggggcggatcgcacctgccagtcaagcaaagccggcgccggacgcgcgtcctatctcaacagcgatagcctgctcggcaacatggaccccggcgcccacgcggtggcgatggtgtttaaggcgctggcggaacgctaagccttccccggtggcgctgcgcttaccggggcgatgtaacaccgccgaatagcaggtcgggtaaggcgtaagccgccacccgacaaaaaacggcaccgccggtagcccggataaggcgcgacgcgccgctatccgggttttaccacgatggctttttacttgctgtgccagtacgcctgggaacgcaccagctgctgatcgatgctctcgtcttcaaagcgcgccagcagcgatttcaccaccgcgccttcgccggtcagccagataaaataatcctccgccggcaccttcacctgcgccagacgctcggcgacgaaggccggattgtggcccaccacccactcgatgttaaaaccgtcgagatccgccagataatctttatacgacgcatcggcgatagtaacgatggccgtcacctgcggcctcgccggcagctggcgtaatcccagtagacgacggcgcagcgccggcatgccggactcatcgcaaacatacagctgccaggcataatcttccggcaccaccagcgagccgcgcgggccgccgatcaccagcttatcgcccacttttgcttccagcgcccaacggctggcgataccgccatcgtggatatagaaatcgtaagccagctcgtgacgttcggcatcgtacagcggcgtatagtcgcgggtggcaggccgcacgccttccccccagtcaatcccctcctcggtcacctgcggcggggtaaatgccgcgcccggctcggggaaaaaaagcttggtatggtcgtcaaagccgtgagaggcgaagccttccagcgcctcgcctcccagcacgatacgctggaacgccgcgcctgcgcgctccacgcgcagcaccgtcagctcacggaaacgcagctcattgcggacacgctgcgggtacttgtctgctttggtttttgtcatcatcgattgccttcgtgaacggtaaatagatatatctaaacttgatgcaaatgataatgattgccaactaataagaatgcaagtctttttttgatatagtcaaaacaaaccgcatcaaaatccacagtcagaaaataatttcatatatatcaatatattaaaaaataaatagcaaccagcattgcgaacattcattttttagatataaattagatatatcaaaaacagcaggaggtaaccatgcgacatcatcatgaagaagggcgtgggccacgcgggcgccacggtgatcccagcgaacacggcgaccatggccgccgcggcggcggacgtcgccagcgtttctttggccacggcgaactgcggctgatcattctggatatcctcagccgcagcgccagccatggctatgagctgatcaaagagatcgaaacgcttacccaggggaactacagccccagcccgggggtgatctatccgacgctggatctgctccaggaccagggccttatcagcgtggaagacgacaacggacgcaagaaaatccttatcagcgaggaaggaaaacagctgcacgccgagaaccaggagcacctggcccatatccaggagcgcctgcaggcgcggatggtcggctgcgagctgcgccgcgatccgcagatgaagcgcgcgctggaaaacttcaaagcggtcctcgacctgaaagtgaaccagcaggccagcagtgccgcccagctcaagcagatcatcggcattattgaccgggcggcgatggagatctctcagctcgactaagcctcttttttcaccaccggctgccccgcgctggggcagcccgcaccacggcggatcgccccgtccattgccgccaggcagaaaatctcgtcagctcaggaataaaacgtgccaatagtggcgcaatgagattaaattttacacaattcgtcttttactttgcatttatcccgattttcaccgcttctgccgaactggcgtaatccctgcaatacttaatccagtatcgtgtgatacgtccgccccaggagcacattttgaacaggttaccttccagcgcatcggctctggcctgcagcgcacacgcactgaatctcattgaaaagcgcacgcttgatcatgaggaaatgaaagcacttaaccaggaggtcagggaatactttaaagagcatgtgaatccggggtttttagagtatcgaaaatcggtcacagccggcggggattacggagccgtagagtggcaagcgggagggttaaatacgcttgtcgacacccagggacaggagtttatcgactgccttggtgggtttggcatcttcaatgtagggcaccgtaatccagttgtggtatccgccgtcgagaatcaactcgcgaaacaaccgcttcacagtcaggagctgctggacccgctgcgggcgatgctggcgaaaaccctggcagccttaacgcccgggaaactaaagtacagtttcttctgcaacagcggtaccgaatcggtagaggcggccatcaagctggcgaaagcctatcagtcgccgcgcggtaaatttaccttcatcgccaccagcggcgccttccacggtaaatcgctgggcgcgctgtcggccaccgcgaaatcgaccttccgcaaaccctttatgccgctgctgccgggcttccgccacgtgccgttcggcgatatcaacgccatgcgcaccatgctgagcgagtgcaagaaaaccggcgacgacgtcgcggcggtgatcctcgagccgattcagggcgaagggggcgtgatcctcccgccaacggggtatttgccggcggtgcgtaaactgtgcgacgagtttggcgcattgctgatcctcgacgaagtgcagaccggcatgggccgcaccggcaagatgttcgcctgcgagcatgagaacgtccagccggacattctgtgtctggcgaaagcgctcggcggcggtgtgatgccgatcggcgcgacggtggcgacggaagaggtcttctcggtgctcttcgataacccgttcctgcacaccaccaccttcggcggcaacccgttggcctgtgcggcggcgctggcgacgatcaacgtgctgctgacgcaaaacctgccggcgcaggcggcgcagaaaggcgatatgctgctggacggtttccgcctgctggcgcaggagtatccggacctggtgaatgaagtgcgcgggaaaggcatgctgatggctatcgagtttgttgataacgagattggctacgactttgccagcgagatgttcagacagcgggtgctggtcgccgggacgttaaacaacgccaagacgatccgcattgaaccgccgctgacgctcacccttgagcagtgcgaacaggtgctgaaggcggcgcgcaaggcgctggcggccctgcgcgtttcggtcgaagaagcgtaataaagtgtccttcaccctctccctctgagagggtgaaggataaccctcacacctgcggtaacaggccgataaagctgcgcttctgccgcggctgcgacatcatctcctccagcttttcgacgcaggctaaatagtgcggcgtcttcttatgcgccagcaccgcctcatcgtctttataggcttcgtagataaaaaagcgggttttcacctcgggatcctgcaggacatcaaagcgcaggttgcctggttcccgcagcgcgccctcgtggttggcgcgaaacacctcgagaaactcatccacccgctcgggtttaatattaatctccaccagcgtcacgttcatttcagctctccctgtttctcttcctgccagaactgatacgcttcgcgcgcgttcagattctcatgcaccacctttttcaccgccttcagcatcgcgcgcggggcgctggactggaagatattgcgccccatatccaccccggacgccccctggtcgatcgcccgccagcacatctccagcgcctcatgctccggcagttttttaccgccggcgatgacgatcggcaccggacagctggcggtcactttttcaaagccttcctcaacgaaataggtcttcacaaactgcgcccccatttcggcggcaatccggctggccagcgagaagtagcgcgcgtcgcgggtcatctctttgccgacgccggtaaccgccagtaccggcataccgtagcgattgccggcatccaccagtttgatgatgttattgatcgactgatgttcgtattcgctgccgatatagacctgcgccgccaccgcgcaaacgttgagacgaagcgcgtcttccatcgccaccgccacgcattcgttagagagttcgctcaaaatcgaattaccgccggaggcgcgcagcaccaccggcttattggtggccgccggtacctggctgcgcagtacgccgcgggtgcacatcagcacatcggtgtcggcaaacagcggcgcaatcgacaggtcgatacgctcaagcccggtcgttggcccctggaagtagccgtgatcgaaggccagcatcaccgtgcggttgctgtgcggattaaagatgcgcgccagccgcgactgcatgccccaatccagcgagccgcagcctttcagggtatacagcgtgttctgctgcgggcggtcgataccgaagtccttaccctctttgatgtcgtctaaatcagccatctcatcctccgtcagaagtcgtagttgttgatattctctttgctgaacaccacgcgctccggcagcagcacgataccgttgcccttcgcttcatactggtagccctgcacgctattcggttcaaccttcagcgagccgatatctttcacctcaacgctatcgcctacgttaagatcgccctttttcagcaatcgatcggcgacgttaaccgcaattttgccctgcttaaccacatcccacaggccgaacgctttcaccgtgccgcgctcaacgtacgggcgcatcacgttcggagtactaaagccgacgatcgccacgccctgacgcttgaggttctccgccgcctgcgccgccgccggcagcgcattggcatccggcgcgataatggcgtcgagatccggatacgcttttaagatcccctcggcggtttgcagcgatttggtggcatcgttatagccaaactgggtggtgacgatttgccactgcggatgctctttttcgattttggctttggcttccttcacccactggttctggtcggtcaccgtcgggctggagtaaaaaaacgccactttggcggcaggtttgctgacctgcttttccgccatctccaccagcaggccaccgagctgctgcggcgtgccctggttgatatagatgctgcggcactccggtttggtatcggaatcccaggtcaggactttcaccccgcgctgcatcgcccgcttcagcgccgggcacaggccgtccggcgagacggcggagacgataatcgcgttgtagccctggttgacgaagttgttgataagctgcacctgcccggagacgctgggctcggtcgggccgtcataggtgacatcaacgcccagcgctttccccgcctctttcgcgccgttgccgccgctggtaaagaagccgacgccaaccagcttcggaataaaggcgatgcggtccgccgcctgcgcggtaaccacgctcatcgtcagcgccagcacgatcagttttaatttcattttatgctccgattgttttatgcgagaaaagacgccgccaggttgcgcgcacccattcacggtgcaggctcagcgaacgccccatcaccaccacaaccaacagcgcccctgacagcgcgctcgacacctggttggggatgccgaccatctgtaaaccctgttgcagataccccaccagcaacgctgccagcgcggtacccagtatcgatcccgagccgccgtaaatattggccccgccaagcaccgccgcggtcagcgccggcatcagcaggtcgcgacctaaatccgaacgcgccgagccgaaataggagaccatcaccagcgccgcgaccgccgaggcgacgccaaccaggccatacagcacgtacgggatgccgttcaccgacagcgcggcatagcgcgcggcgcgcgggttttgcccgagtaaaaagaggtggcggccaaagcgcccacgatgggccaatagccagaagaaaaaggtgataatcgcgaacagcaccagcggcagcggcagtccgccgagggttaaattggcgaaggcggtgaagctatcgggaaaaccgccaatcccctcgtaaccggtcgcgccggccatcccggaaagcagcagcgcgccgccgccgtacagatacagcgtgccaagcgtgatcaccagcgggttgatgccggtgtagtgaatcagcgcggcgttgaataacccgcacagcagccccaagagcaacgtcagcgataccgcgagccacagcggccagcccgcctgggtcatcaccccgagggcgatggcgcacaggccgatggtcgagcccagcgaaatatcgatcccgccgctgatgatgaccagcgtcagcggcagcgcgacgatgccgatgcagataaagtcgctggtgctaaagagcagcatattgatatccagcatgcgcggattcaaagcgccgaatagcaggatttccgcgatcagcaacgccagcagcgcgctttcccagttaagcttcagcttcatttaagccacctctttgcttttgcgttcgggaaagcgggcaacctgtttgcttcctttgttacctggctggaaacggctgtacttcagcgcccgctgatggcgggccagcgcctggcgcaggcggccatcgagcaccagcacgccgagcagcaccaggccggcgataaagtcattccaccaggcgggaaggcggaacagcaccagtacggtgtcaatttgggtgaggaaaaaggcgccgagaaacgcgccaagcaacgtgccggtaccgccgagcagcgagatcccgcccagcacgcaggcggcgatggctttcatctccaggccgctgccggtctgattaggcacaaaaccaatctgcgcggcgaagacgatcccggcgcaggccgccagcataccgttgagagtaaaggccagcatccgcgtgcggttgaccgccacgcccagctgacgcgcggcggcgaggttatcgccaacggcgtaaaaatcacgaccgaatgcggtgcgcgacaacagccagccgcctgccagcagcagcgccagcaccagccagcccagcggcgacacgccgataaacgcgggctccgagagcgatttcaggctgtcgggcaaaccctcgatccatttcccaccggtccacagcaacatcaccccgcgatacaaccccagcgtaccgagcgtcgcgacgatcgccgggatgcgcagccccaccaccagcaggccgttaaaagctccggccagcgcgccaatcgccagcgcgaaggcgatagccgtcgccagcccgtaaccgtagttcagcgccacgccgacggcgatggcgcacagcccaacggtcgaacctaccgacacgtcaatattgcgggtcagcatcaccagcgtcgcgcccaatgccagcaggcagaggatctgcgagctggcgaaaatcatcgccagggtctgcaggatgaaataggctggattgagcgccaccagcacgacaaagagcgccacgatggcaaaaaaggcgctcagttcgcgattcttcagtaacgttttcatgcctgtcctccgaaggccagggtcatcatgcgatcgacggtcaccgcctgccgcgccagctcgccgctgtagcggccctgatgcatcaccagcacccggtcggcaaggccgacgaactcatccacatcggaagagatcatcagcaccgccacgttttgcgcggcaacgctttttagcagttgatagatatcggcgcgggcggagacatccacgccgcgcgtcggctcatcgacaatcagcagtaacggattagcttccagacagcgcgccagcagcactttttgctggttgccgccagagagagtgcgcaccggctgatcgccatcggccagcttgatccccagcgcccggtgatagcgttcaaccaccgccgcctcccgtttcccctgctgccaccacgacggctgattgaacatcaccgtgttccagcgcactggcgcatcgagaaacagccccgagacctggcggtcttccggcagatagaccagcccgctggccaacctgccgcgggtgctgtcgcagctaatctcgcggttctccagccagatccgcccggcgcgcggtgtacgcaggccgtataaggtttcagcaaattcggtgcgcccggatcccaccaacccggccagaccgacgatctctccggcgcggatctccagattgagatcgataaagccttcgccggtaagatcttccacccgcagcacgggaaagtcctgcggttgcgtacggcggttgcccggtagcgacagccacagcttttgcgtgtcgctcagcgcatgatcgcggctgaccggcgtcatcgcgttaatcagttgctcatcgcggtatgccgcggtctcgccgctcagcaccaccgcgccgtcgcgcatcaccgaaatatggctggcaagctggcggatttcgggcaatttgtgtgagataaagacgatcccaacgtccagcgcctgtaacgcgcggatctggctaaacagtctctcggtttcacccggcgttaaagaggcggtgggttcatccaggatcaggatcctggcctcgcgcatcagcccgcgcaggatctcgaccatctgttgatcggctacctcgagcgtgctggcgctggcgtcgaggttgatctggcagttcaactgctgcagtttgtcctgcaaccgcgcggcggtatccgcccgcttcggcaggcggaaaagaatgttctcgcgcacgctgaggttgggaaacagcatcggctcctgcggcaccaaatagatgcctaactgatgagccagcgccggattgaggcgcgcaaacgcgcgttcgccgatcgtcagttcaccgctatccggcgtttcgacgccggcgatgatcttcatcagcgtcgatttacccgcgccgttgccgcccatcagcgcatgcacctggcccgcgcctagcgtgaaatcaatgcccttgagcaccgcaacgccggagaactgtttgcaaatctggcgagcttcaagcagtggcttcatcatcgcgcctcgattgaacaaatgatttttaaatttaataatgttcaaaagcgtagacggtgaactatatttacaaccgtgcgaagatcacactttggtgctttagatcgtcaggaaaaaatgggccagcgatgaaagatccgttttgccagtcggctcacactttccgaccgcgcaatagcgaacatatgatctaaatttttataagagttcaatttatgagcgaaaaacgcattacggaagagaaccgctacgccgggctggcgttagccgaggaagagctggtggcgcgggtggcgtggtgctactaccacgacggcctgacgcaaaatgacatcggcgagcgtttggggctgccgcggctgaagatttctcgcctgctggagaaaggccgccagtccggggtgatccgcgtgcagatcaactcgcgctatgagggctgtctggcgctggaaagtgaactccagcagcgttttggcctcaagattgcccgcgtgctgccggcgctcaacaccccgccgatgaatacccggttggggatcggcgcggcgcaatcgctgatgggcattctgcagccgggacagctgctggcggtcggcttcggcgaagccaccatgagctgcctgcagcatctcagcggctttatcggctcgcagcaggtgcggctggtgaccctctccggcggcgtcggcccctatatgaccggcatcggccagcttgatgccgcctgcagcgtcagcattattccggcgccgctgcgggtctcttcggcggaggtcgccgagatcctgcgccgcgagtcgagcgtgcgcgacgtgatgctggcggcgacggcggcggacgcggcggtggttggcattggcgccatcgatcagcggcgcgacgccaccattttacgctccggctatatcagcgagggcgaacagctgatgtacgcgcgcaaaggcgcggtcggcgacattttaggttatttcctgcaggccgacggccggccggtagaaggactggagatccatcgggaactgctcggcgtaaccctggatgagctggcgcagctgccaaccatcgtcggcgtcgccgggggagaacaaaaagcgcaggcgattcatgccgctctgattggcaagcgcattaatggcctggtaacggaagagacaacagcacgcgcggtgctcgcactggcctcctgacggcctggcgccgcgcgacaacagcgaggcgcatgtcatgagttacctgttagcgttagatgccgggaccggcagcattcgggcggtcattttcgatcttaatggccgccagttggcggtaggccaggccgaatggaaacacctgagcgtcgataacgtccccggctcgatggagttcgaccttaccaccaactggcagctggcctgccagtgcattcgccaggcgctcgacgccgcccggctctctgccgccgacattcaatccgtcgcctgctgttcgatgcgcgaagggatcgtcctctatgaccgcaacggcgaggccatctgggcctgcgccaacgtcgatgcccgcgccagccgcgaagtggcggagcttaaggagatccacgactttcgttttgaatccgaggtatacgaggtctcgggacaaaccctggcgcttagcgccatgccgcgcctgctgtggctggcgcaccaccgccccgatatctaccgcaaagcggcaaccatcaccatgatcagcgactggctggcggcgaagctttccggcgagctggcggtcgacccgtcaaacgccggcaccaccggcatgctcgacctgttcagccgcgactggcgtccggcgctgctggatatggccggactgcgcgccgatatgctgtcgccggtcaaagagaccggtaccctgctgggcgccgtcaccgaagcggcggcgcagcagagcggcctgcgcgccgggacaccggtggtgatgggcggcggcgacgtccagctcggctgcctgggccttggggtggtgcgtgccgggcaaaccgcagtactaggcggcactttctggcagcaggtggtcaacctgccgcaggtgcgtaccgatccgcagatgaatattcgcgttaatcctcatgtcattcccggcatggcgcaggcggaatcgatcagcttctttaccggccttaccatgcgctggtttcgcgacgccttctgcgctgaagaaaaactgattgccgagcggctcggcgttgatgcctattcgctgctggaggagatggccagccgcgtgcccgccggttcccacggcgtgatgcctattttttccgacgccatgcactttaagcagtggtaccacgccgcgccgtcgtttattaacctctccatcgatccggagaagtgcaacaaagcgaccctgttccgcgcgctggaggagaacgcggcgattgtctccgcctgcaacctggcgcagatttcgcagttctccggcgtgacattcgagagcctggtgtttgccggcggcggctctaaaggcgcgctgtggagccaaatcctcagcgacgtcaccggcctgccggtgcgggtgccggtggtccgcgaagccactgctctgggctgcgccatcgccgccggaaccggcgccgggctgtatgacgatatggccagcaccggagagcggttagtgagctggcaccgcgagttcaccccaaatccgcagcatcgcgagctgtatcaggagatgatgagcaaatggcagacggtgtacgccgatcagcttggcctcgtcgatagcggactgacaacgtcgatgtggcaggcgccgggcctggagcgccgccagcgcgtagcgtcctccccgtcaccctaaccaccggtaccgatccgcctttccccctctccctttgggagagggccggggtgtggggcaacgcttcgccgttctttgaatcccatcacaatcaccgcactccccttttccctttttctccgcgacggctaaattagtaactcatccgaccacataacaataattttacattggaagccactatgagccgctatccgtcgcttttcgccccgcttgagctgggcttcacaacgctcaaaaaccgcgtgttgatgggctcaatgcacaccgggctggaagagctgccggacggcgcgcagcggctggcggccttttacgccgagcgcgcccgtcacggcgtggcgctgatcgtcaccggcggcatcgctccggcgccctctggcgtcaccatggccggcggcgcggtactcaacgacgccagccatctggcgcaccatcgccatattaccgacgcggtacatcaggaaggcggcaaaatcgctctgcagatcctgcacaccggccgttacagctaccagcccgcgctggtggccccctcggcgctacaggcgccgatcaaccgttttaccccccatgaactgagccacgatgagatcctgacgctgatcgatgattttgcccactgcgcccagctggcgcgcgaagcgggctatgacggcgtcgaggtgatgggctctgagggctatctgattaacgaatttctcgccgcgcgcaccaaccagcgcgacgaccaatggggcggcgattatgccaggcgcatgcgtttcgccgtagaggtggttaaggcggtgcgccagcgcgccggccacgatttcattatcatttaccgtctgtcgatgctcgatctggtcaacgacggcagcacgctggcggaagtcactgaactggccaaagcgattgaagcggcgggagcgaccatcatcaacaccgggattggctggcacgaagcgcgcattccgaccatcgccacgccggtaccgcgcggagctttcagctgggtcacccgcaagctgaagggcgcggtgtcgatcccgttgatcaccaccaaccgcattaacgatccgcaggtcgcggaggatattctcgcccgcggcgatgccgatatggtatcgatggcccgcccgttccttgccgacgccgaatttatatcaaaagcgcaggacgatcgcgccgatcagatcaacacctgcataggctgcaatcaggcgtgtctcgatcggatcttcgtcggcaaaatcacctcctgtctggtcaacccgcgcgcgtgtcatgaaaccctgatgccggtcctgcctgccaacgcgcctaaacggctggcggtggtcggcgccgggcctgccggtctggccttcaccgtaaacgctgccgcccgcggtcatcacgtcacgttgtttgatgcgctcccggagatcggcggtcagtttaatatcgccaaacagatccccggcaaagaggagtttcacgagacgctgcgttactaccgcaccatgctcgatcttcatggtgtcgatctacgcctgaacacccgcgtcacggcagacgatctgctggcgttcgatgagacgatcctcgccaccggtatcgccccgcgcctgccggcgatcgacgggatcgatcatccaaaagtgctgagctaccttgatgtcttgcgcgataaagcgccggttggcgcgaaggtggcgattatcggctgcggcggcatcggcttcgacaccgcgatgtttttaagccagtcgggcgcggccaccagccaggatatcggcgagttctgccgcgaatggggtatcgataccagcctgcaaacggcgggagggctgagtgctgaaggcccgcagctgagtaaaagcccgcgacagattgtgatgctgcagcgcaaagccagcaaaccgggcgaagggctcggcaaaaccaccggctggatccaccgcgcgacgctgctggcgcgcggggtgaaaatgatcccggcggtcagctatgaaaagatcgatgatgaagggttacatgtcactatcggcggcgagcgccaactgctggcggtcgatcaggtggtgatctgcgccggtcaggagccgcgccgcgagctggcggatccgctgcgcgcggcggggaaaacggtgcatctcatcggcggttgcgacgtggcggcggagctggatgcgcgccgggcgattgcccagggcactaaactggcgctggcgatttagccctgtcccgggggcggcgcgatgcgccttccccgggctaccacgataatcccgcacgctagcccggctaaggcgacagccgcgagccgggggaaaccgcgacaagaatcagcgctgcttacgcaccttcgttgctttcaaaatgacaaacttattgttcgtcgcaatcgtcgtgcaattaccaaacgcacgcttcagcttacggaagtaatcgaggtggcggttgccgacgacgtacagctcgccgccgtatttcaggctgcggcgggcatcgttaaacatctgccaggcgatatggtcggtaatggcgtgctgctgatggaacggcggattacacaggatcgccgtaaagcggtcgggctcaatgccggagagcgagttgttgaccatgaattcacagcgtgcgatatcgtccggcagattgcgctcgacgttcaaccggctggaagccaccgccatgtgcgactcatcggtgaacatgacccgcgcgttcgggttttgcgccagcgcctgcaggccaatcaccccgttgccgcagccgagatcggcgatctcgccttctagatcagacggtaaatgctgcaggaagaaacgcgcgccgatatccagcccgctgcgggcaaaaacgttggcgtggttatggatggtccacggcgtgccgtccagcttccagctgtaggtttgcggcgcatcggcaagctcaggagcggtgaaaacgcagtggatcaaacgcgcttttttccacgccagcgaggtggtggtggtgccgaggattttttcaaacagcgccagcgtcgagttgtgcacatcacgggctttcgccgcggcgatgatgcgggtttccggcgtaactacttcgcgcagggcgcgcagctgctgttccagcagcgccagctgttttggcaccttaatcagcaccagcgccggcgcggccggtagcgggctcaggctatcctgaaagcgcacgctctcttcatcgataccgttcatccgcaggttgtggcgggtcgccagctcggaaataaaggagtcgttgatactgaccgggttgcgctccgccagcgcgcaggcgagcgcgccaaagccgtcgttgaagatgagcgtcaggccgtcgacgtcattcacctgttgcagcagatattcatccgccgcttcccatgcctgaagcgcttcttcttcagcgttaggtgggaaccgctctaatgtgaataactcaccgtttaactctgcctggctcatcgcctctccgcctccggaatagtaaaacccgcgagtttatacgcaaatcctgtccagttgaagagagatcgctgatcatcgccgctcagcgtagatcgccctcgtcatcggctcgcagcagcgttatcgacgcgcgagcgccgggcatcagctgctgcagataacctaccagccgctctcccgcctcatgcagggccgacaacggcatcgccggcaggctttcgagaataaaccacatcgtctgcgcgccgctgtccagccgggtgcgcacgccctgtcgccagttccagcgtcggcaggttacgcctatatcatcccgccagatgacttcgcccggctccggatattccactaccggctctgccgattttagcgtatcgaatggctcatcgccgcgggcaatggccagccgcggttcgccacggtaggcggccagattttccccaccgaccgggacggcatagcgaatgctgatcgcgttgtagatatccaccaccggatcgatggccggcaggctcccctctttcagcacccgcttgcgcagcgcctgcgccgaacagggggtacgtttcgccttcgcgccgaaggcgctgaacgcttcatcccatgccgccaggtgcgcttgcgcccagggcacatcatcctgctgcaccgccaggcaggcctcggccagcgcctgctccgcgacggcgggatcggccaccggcgcgctctccaccacaatacttaatgcccgaaagcccggcgccaggcggctgaccgcagattcgattgacggcgttacgctacgcattcgataatcctgtaatgaccaatttgtttcatcatagtgaccaatgaacgtaaaagtcaatataacgaccgattcaggatctgatgtcgaccaggtaagtcgcgccgtcgccacgcggctgaaggcctaccgtaaagcgaaaaaaatgtcgctggacgagctgtcgcgccgggccagcatcagcaaaggtatgctggtcgagatggaaaaagaggccgccaatcccagcattgcgatcctctgcaaactcgccgccgcgctgggcgtctcggtggcggatattgtcaatgtgtcaagcgaacccgcgttgcatattattcccgccgagcagatccccaccctctggcaaggcccgctggggggcagcgccaggctcctcgccggcaccgccgggccgaatatgattgagctgtggcgctgggagatgcagcccggcgaagcctttgcctcgcctggccacccggcaacaaccttcgagctgctgcacgtggaagccggcgcgctgacgctgacgcttggcgagacctgccgcacggtggcggccggggaatcggcggtggcccgcaccgaaatagagcacggttaccgcaatgagggtaccgcgccgctggtctttaccatgaccgtggctgaactgccctcctgacagacataatgataagacgatgacaaaactcatttatttacagggctatcctgaatcgctgctggcgcaggtgaccacgttaatcgagcaaggccgcctcggcgaggtgctgcaaaagcgctatccgcaagggcacgacgttaacagcgataaagcgctgtatcagtacacccaggacttgaaaaaccgctttctgcgcggcgcggcgccgatcaacaaagtgatgtatgacagtaagatccacgtgctgaacaatgcgctcggcctgcataccgccatttcccgcgtgcagggcggtaagctgaaagctaaagcggaaattcgcgtggcgacggtatttcgcgacgcgccggaagcctttctgcggatgatcgtggttcatgaactggcgcatctgaaagagaaggatcacaacaaggctttttatcagctgtgctgccatatggagccgcagtaccaccagctggagttcgacacccgcctgtggctgacgcacctttcgttaaatcgttctgcgtagtgacgcactggttttgtcatgacggcatgatagagtggcggcaggttccctttaacggagttcgtcaacgtttatgatacgtttcgcagttgttggcacaaactggatcaccaagcagtttgtcgatgccgcccatgaaaccggcaaatataaacttaccgccatctactcccgcagcctcgaacaggcgcaagccttcgccaaagactatccggtcgagcatctgtttacctcgctcgatgaactggcacagagccctgacgttgacgcggtctatattgccagcccgaactcgctgcactttccgcagacccggctgttcctgagccataagaagcacgtcatttgcgaaaagccgctggcgtcgaacctgcaggaagtcgaggcggcgatagcgctggcgaaagaaaataacgtggtgctgtttgaagcctttaaaaccgccagtctgcctaactttctcctactgaaagaaacgctcgctaaagtgggcaaactacgcaaagcctttatcaactactgtcagtactcctcgcgctatcagcgctaccttgacggcgaaaaccccaacacctttaacccggcgttctctaacggttcgattatggatatcggcttctattgcctggcgtccgctgtggcgctgtggggcgagccgcaggccgttcttgccaccgccagcctgctggacagcggcgtagacgcccagggcaccgtggtgctgagctatggcgacttcgacgtgacgctgcatcactccaaagttagcgattccgcgatccccagtgaaattcagggcgaagacggcgcgttagtgatcgaaaaaatctccgaatgtcagaagctggcgtttgtgccgcgcggcggtaaagcccaggacctgacgcagccccagcacattaataccatgctgtatgaggcggagacctttgcgcggctggtggagacacaggatgtggatcacccgggcctggcggtgagccggatcaccgccaaactgtccagcgaaattcgtcgccagaccggggtgatcttcccggccgatacgcagccgctggcgtaaaagagtgtaaaggcccgaccggccgccattgacgaaaaccgccctgtgacatattttgttacgtgcaaaggggagtaacttccttgccggttgatcgtcattacgatgcgtgcaataccgcatccggtcgccgggcaataaccaaagcccatcgcgatgtactttggttgttgtaagtgagaccttgccggaaggcgaggtctatgcataaaagcgcagcggctgccgtcttccgacgtcagccgttttgtttttatgtaaggaatatcaaatgaatactgtcggcacgccgttgctatggggtggattcgctgtcgttgtcgcgatcatgttggcaatcgacctgctgcttcagggacgacgcggttcgcatagcatgaccatgaagcaggccgctggctggtcaatcctctgggtcacgctttctctgctgttcaacgccgccttctggtggtatctggtgcaaacccagggccgggccgtcgccgatccgcaggccttagccttcctcaccggttatctgattgaaaaagcgctggcggtcgataacgtcttcgtctggttgatgctgttcagctatttcgccgtaccgcctgctctgcagcgccgggtgttggtgtatggcgtactgggcgcgatcgttctgcgtaccattatgatcttcgccggcagctggctgatttcgcagttcgactggctgctgtacgtctttggcgccttcctgctgtttaccggcgtgaagatggcgctggcgaaagaggacgactccggcatcggcgataagccgctggtgcgctggatccgcagccatctgcggatgaccgataaaatcgagagcgagcgcttcttcacccgtaaaaacggggtgctgttcgccaccccgctgctgctggtgctgattctggtggaactgagcgacgtgattttcgccgtcgacagtatcccggcaatcttcgcggtcaccaccgatccgtttatcgtgctgacctcgaacctgttcgccatcctcggcctgcgcgccatgtacttcctgctggcgggggtcgctgagcgcttctcgatgctcaaatacggtctgtcggtgatcctggtgtttattggcgtgaagatgctgatcgtcgacttctaccatatcccggttgccatctcgctgggcgtggtgggcggcatcctggccgtcacgctgctgattaacgcctgggtcaacaggcagcacgacaagcagcgcaaactgccagagtaatctactaccgcgccgtcggccctcgctggcggcgcggtaatcagctatagcagacgttctcgtaacgagaatacctgctcatgtcacaattatgttgctacgcagttaaaaaataagatccatattaaaatcacagtattttacgcttcccgccagtctttctttccgtatactcgactatgcaaacatctacttacatcctgacataaacgtaaaaaataatacgtggctgggatggcttgctacatcactggaaggaatgaattatgacaacacgcactccctcatcagggtggctctcccgcctggcgcaaggcagcctggtgaaacaaattttaatcggcctggtgcttggcgtactgttggcgctggtctctaagcctgcggctatcgccgtcggtctgctggggaccctgttcgtcggcgcgttaaaagcggtagcgccggtgctggtattgatgcttgtcatggcctcgatcgccaaccatcagcacggacaaaaaaccagtatacgccccattctgtttctctatctgctgggcacctttagcgcggcgctgaccgcggtgttgttcagttttctctttccctcgaccctgcacttaaccaccgccgccgacagcatcacgccgccgtcggggattgttgaggtgctgcgcggcctgctgatgagcatggtgtccaacccgatcgacgctctgctgaacgccaactatatcggcattctggtgtgggcggtggggcttggcttcgccctgcgtcatggtaacgacaccaccaaaaacctgatcaacgacgtctcccacgcggtgacctttatcgttaaagtggtgatccgctttgcgccgctggggatcttcggcctggtatcttccaccctggcgaccaccggtttcgagaccctgtggggctatgcccagctgctgctggtgctggtgggctgtatgctgctggtagcgctggtgattaacccgctgctggtgttctggaagatccgccgcaacccctatccgctggtgctcacctgcctgcgcgaaagcggcgtttacgcgttcttcacccgcagttccgccgccaacattccagtgaatatggcgctgtgcgagaagctgaatctggatcgcgatacctattcggtctctattccactgggggcgaccatcaatatggcaggcgcggcaatcaccatcaccgtgctgacgctggcggcggtgcatacgctgaatattccggtggatctgccgacggcgctgctgctgagcgtggtcgcttcgctgtgcgcctgcggcgcctccggcgtggcgggcggctcgctgctgctgatcccgctggcctgtaatatgtttgggatcccgaacgatgtggcgatgcaagtggttgccgttggctttattatcggcgtgctgcaggactcctgcgaaaccgcgctgaactcctccaccgacgccctgtttaccgccgcggcctgcatggcggaagacgaccagctggcgaaaaacgccctgcgcggataacgcctttgccctccgctatcgggcggaggggctctcttcctgtactgcgttttcaaccttaaacggatcgataccgcgcttttgcatccggcggaagcgaatgatattcagcccgttgacgatcaggaaactgccttctatcagcgtcccgccaatggaacccaaccacagattatgcgtgacccagcaggcggtggagcaccacatcacgcagcggacggttagccctttgcagcgaaacagcgcccaggtgctggcgacggtgccaatgatcggcagcagctccatggcatgctgcagtttacccaggccgagaatcaacgtcaggaggataaagactgtcatcacccacaggctacgggtgcgtaaggaaatgaccgtgcgaagcgcattgagcccggcgctcattccagccggcccggcgcccatcaggaaaaaatgaacgccgataatagcgctatagaccgccagctgtagcctgaaacggcgttcatcgcggttgataaaggtggtaatgccgataagaaaggcgatgacgccgaccccctgggccagccaatacgcggtcatgtaagctccctgactgaaaaaaacaaacggcgcttcactggctgaaacgccgctgttacgagcccgatggcgctacgctatcaggccgatacacaaaccaagcctctgggcgccaacgcaaatacgcctttacagggtaacaccgcttttaaagatggccagctcgcggaagtcattctgctcattacaggtcggtttaccgttggcgaaggctacaatggcatccacaaactcttccagcagctgcggcatcgttttgccgtggagcagctgcccggcatcaaagtcgatccagtgctttttcttcgccgccagctcgctgttggtggcgatcttcaccgttggcacaaagccgccgtacggcgtgccgcgaccggtgctgaacagcaccatatggcagccggcgccggccagcgcgctggtggcgaccgcgtcgttgcccggcgcgctcagtaaattcagaccatgaaccttcaggcgctcgccgtagcgcagaacatccaccacctggctggagcccgctttctgagtacagcccagcgacttatcttcgagggtagtgatccctccggctttattacccggcgaggggttttcgtaaataggctggtcgtgagcaataaagtactgcttaaagtcattgaccatggtcaccagcttgtcgaaggtcgcttcgtcgcggcagtggctcatcagcaactgttcagcgccgaacatctccggcacttcggtcagcacggtagtgccgccgttggcgatcacatagtctgagaagcggcctagcatcggattagcggtaatgcccgacaggccgtccgatcccccgcactcgaggccaaacttcagctcgctgagcttgcccggctggcgtttatcctgacgcatcacttcatacagctgatgcagatgctcaacccccgcctccacttcatcgtcctgatgctggcaaaccataaagtgcacgcgctgcgggtcaaactcgcccagcgtctcgcgaaaggcctccacctggttgttttcacagccaaggccaaccaccagcaccgccccggcgttcgggtgacgaaccatattttgcagcatggtgcgagtgttgatgtgatcgtccccaagctgcgagcagccataggtgtggctgaagagatgtaccccatcgatatcctcagcgccatacgtctctttcaggaaacggttctgcatttgtctggccatcgcgttgacgcagccgacggtcggcaggatccacagctcattgcgcacgccgacgtcaccgttggcgcgacgataaatctgtacttcgcgatccgcaggctgtggcggttgggcaaccaggtccggttgatagcgatacgcgtcaaggtcgctgagattggtgcgcgtattgtgcgcatgaacatgctcgcccggcgcgatatccgccagcgcatggccaatcggcaacccgtacttaacgacgttttcccctttcgcgatagcgcgcagtgcaaacttgtggccgcgaacgatatcctggccgagggtgaccgagtcattatcaatcgtcaccacgctaccggcagcgatatccgtcagcgcgaccgcgacgttatcctgcgaatggattttgatgtattgcatatcaaccgacctctggccttagttcagttcaatggcgaaatagtcacgcgcattgttaaagcaaatgtttttcaccatctcgcccagcagcgcgatatccgcaggcgcttcgccggcagccacccaacggccgatcatctggcacagaatgcggcggaagtattcgtggcgcgtgtaggagaggaagctgcgactgtcggtcaacatcccgacgaagcggctcagcagcccgagctgcgccagctgggtcatctgccgctccataccgtctttctgatcgttgaaccaccagccggagccgaactgcatcttgcctggcatgccttcaccctggaagttaccgatcatggtgcccagcacttcgttatcacgcgggttcaggcagtagagaatcgttttcggcagcaggttttcttcgttctgcttgctcagcagcttagacagctcttccgccatcggacgatcgttgatcgagtcgaagccgacgtctggccctaacagtttgaactgacggaggttgttgttacgcagcgcgccaatgtggtactgctggacccagccgcgacgggcatactctgcgccgaggaataccagcaccgcggttttgaactgcgccacttcgtgttcgctaagggtctcgccagccaggcggcgcgccagaatgtcatccagctcggcgtcggtcgcttcggcaaacagcaccacgtccagcgcatgatcggagactttgcagccgtgtgcggcaaaatgatccagacgtttggtcagggcgctttgcaggtcagcgaagcggcgaatatcggtatcggatacctcgcccagcttagccatataatcattgaaggtcgccaactcgatgttgaaggctttatccgggcgccagctcggcagcactttgatgtcaaaggagttgtctttggcgacagccgcgtggtgctcaagagaatcaatcggatcgtcggtggtaccgaccatcttcacattcatctgcttcatgattccgcgggcggagaaggcatcctgagccagcaaatcattacactggtcccagatctcatcggcggtggatggcgacaacagcttacctgtaataccaaaaggtcgacgcagctctaaatgggtccagtggtataacgggttgccaatagtgtgcggaaccgtggccgcccaggcgtcaaatttctcgcgatcggacgcatcaccggtacacagacgctccggcacgccgttagtgcgcattgcgcgccatttatagtgatcgcctttcagccagatgtcatacaggtttttaaagcgatagttttcggcaacctgctgcggcggaaggtggcagtggtagtcgaaaatcggctgatctttggcgtaatcatggtatagacggcgggcaaactcggtatcaagtagaaaatcttcagtcataaacgatgtcattcgcgtgtcctcttcgctccagtgcgggagcctttcagatgattgactacaatgctgacaaagttatcacaccaatttctacagaccgaactgtttttcgtgagttagatcaataaacgtcgataaaaaaatgaccgccctggagcaaaacacctcgccagagcgcgccatctctggctttccaggcaagggataaagaccacactaactttcccacttttgtgacagctctcaacttttaaagttgtatgacaagttatctttctgccgtcgcaacatataaaccgacggaatgcattaccggtgcttatggcatcggcttatacggaatggataccgactttcaacataacaactgatggtaaggttcaggccagaggggactaccctcctgaatcctccgtttcgctttcccggccgcttattgcgctcggtaaaggccgcacctgatgcggaaagataacagacgatgaggtttacatgcgtaaaattaaagggttacgttggtacatgatcgcgctggtgacgctgggcaccgtgctgggctacctgacccgtaacaccgtagcggcggccgcgccgacgctgatggaagagttacacatttcgacccaacagtactcctatatcattgcagcctattccgctgcctataccgttatgcagcccgtcgcggggtatgtccttgatattctggggaccaaaattggctatgccttcttcgccatcgcctgggcggtattctgcggctcaacggcgctggccggcagctggggtggactggcgctggcccgtggcgcagtcggcgcagcggaggccgcaatgatccccgccggcctgaaggccagctcagagtggttcccggcaaaagagcgctctatcgcggtgggctacttcaacgtgggttcctctattggcgccatgatcgcgccgccgttggtggtatgggcgattgtcatgcacagctggcagatggcgttcatcatctccggggtattgagcttcgcctgggccatcgcctggcttatcttctacaaacacccgcgcgaccagaaaaaattatctgacgaagaacgtgactacatcattggcggtcaggagtctcagcatcagaccaataacgcgaagaaaatgtcgccgtggcaaatcctgcgcaaccgtcagttctggggtatcgccctgccgcgcttcctcgccgagccggcctgggggacctttaacgcctggatcccgctgttcatgttcaaagtttacggttttaacctgaaagagatcgccatgttcgcctggatgccgatgctgttcgccgacctcggctgcatcgtcggcggatatctgccgccgctgttccagcgctggtttggcgtcaacctgatcgtgtcgcgtaaaatggtggtcaccatgggcgccctgctgatgattggcccggggatgatcggcctgttcaccagcccgtacgtggcgattgccctgctgtgcatcggcgggttcgctcaccaggcgctgtccggggcgctgattaccctctcttccgacgtctttggccgtaacgaagtcgctaccgccaacggtctgaccgggatggccgcctggctggcgagcaccatgttcgccctggtcgtcggcgcgctggcggataccatcggctttagcccgctgtttgcggtactggccgtctttgacctgctgggcgcgctggttatctggacggtgctgaaaaacaaaccggctgacgatgactcgacgccgcttagcagccgcaaaccggtcacgcagagttagatcgaatggcaaggtaatcgccgatcaagccgccttctcaggcggctttttcatgcctgccagtggtggaaagcgcgtaaaagtggtataacaaatcgaatattgtcgccatcttccgggagcgaatatggaaatcattgaaccacgccgtctatatcagcagcttgccgctgagctgaagacgcgcatcgaacaaggtgtctaccttgtaggggataagctgcccgccgagcgcttcatcgccgatgaaaaaaacgtcagccgcaccgtggttcgtgaagccattatcatgctggaagtggaagggtatgtcgaagtccgcaaagggtcgggtatccacgttatctccaaccatccgaaataccagcaggtggccgatgaaagccttgagttcgccaactatggcccctttgaactgctgcaggcgcggcagctaattgaaagcaatattgccgaattcgcggcgactcaggtgaccaaacaggacatcatgaagctgatggaaattcaggagaaagcgcgtaacgagaaatgtttccgcgactccgagtgggacctgcagtttcacgtccaggtggcgctggcgacgcagaacagcgcgctggcggcgatcgtggaaaagatgtggacccagcgcgtgcataacccctactggaaaaagctgcatgagcatatcgacctgcgtacggtcgataactggtgcgacgaccacgatcagatcctgaaagctctgctgcgaaaagatcccaacgccgccaagctggcgatgtggcagcatctggaaaataccaagcaaatgttgttcaacgaaaccagcgatgactttgaatttaatgccgatcgctacttatttgccgaaaacccagtcgttcatctcgataccgcagtcaacggcgcgaaataaggccttatccctccggcgcgcccccctgcgcgcctgtctgacagtgaggctggagtaagcaagtcatatatagtgtcagcctgtgtaaatcctctcgcctcccatctccgcaatcagcaaaatcaacgagcaacacgttgcaatttctctgacggaaagtcaggtgatttgttacaattagatgcattttgtcgttctgggggtaggtatttacttacttcagtcttatacagggaagcgttcagagcgcctaagcagcgaccataatctcataaaaatcttgtcgccctatatgccacgcgctcagacgtgccgttaaccgatgtaccaggaatcgtgaatggaactatttacccagttattgaatgccttgtgggctcaggattacgaaacgctcgcgaatccctccatgataggcatgctgtattttgtcttgtttatgattttgttccttgagaacgggttattgcctgccgcgtttttaccgggggatagtctgctcgtgctcgtgggcgtgctgatcgccaaaggggcgatgggttttccggaaaccttgctgctgctcaccgccgccgccagcctcggctgctggctaagctatattcaggggcgttggctgggtaatacgcggatcgtgcaaaactggctgtcacacttgccttcgcactatcaccagcgtgcgcatcacttgtttcataagcatgggctctccgcgctgctgatcggccgctttatcgccttcgtacgcacgctgctgcccaccatcgccgggctttccggccttaataacgcccgttttcagtttttcaactggatgagcggcctgctgtgggtgctcatcctgacctcgcttggctatctgctgggtaaaaccccggtattcctcaagtatgaagatcagctgatgtcctgcctgatgctcctgccggttgccctgttggtcttcggactgatcggctcgctggtggtactgtggaagaaaaaatacagaagccggggctaatgatggtcatgaaacgcccttccctgcgccagttcagctggctgctgggtggttctcttctgctcggcgccctgttctggctttggctggcggtgcagcagcaggaggccacgctggcgatacgcccggttggccagggtatcggaatgccggacggtttctccgtctggcatcatctcgatgccaacggcatccgctttaaaagcatcacgccgcagaaggatggtctgctgattaagttcgattccaccgcccagggcgcggcggcgaaagaagttctcggccgcgctctgccacatggttatattattgcccttctggaggacgataactcgcccaccgcctggctatcccgcctgcgcgacgcgccgcatcgcctcgggtaagctgccgccagactgcgtttttaacccagtctggtggtttcccgcatttgttactatgcttaaacctgcgggaatcaacgcattcacgttcaccaacgggaacgggtatatcctccgggtatcccctcagacaatggaaggtactatccatgaaacaccgcatcgctctgcttctggtcctgacttcacttagcgccagcgccctagccgcctctccctgccaggaaaaagagcaggatattcaacgagagatcagctacgccgaaaagcatcataatcaaagtcgcattgatgggctaaataccgcgctacgtcaggttcgggaaaactgtagcgacagtaaacttaaagccgatcatcagcaaaaaattgccaaacagcgggaagagatcgctgaacgtcagcgcgatctgcaggaagcccggaagaaaggcgatgcggacaaaattaacaaacgccagcataaactcaatgaagcgcaacaggagttaaaaacgctggagtctcgggattactaatcaccattaactttcgcaacacggaccacgctacaggagaacgacatggctaaagagaatgtgactgacgaccttcgtgcagaactgaaaacgctggcggataccctggaggaagtactaaattcctcggcggacaagtcgaaagaagagatgggtaaactgcgcagtaaagccgagagcgcgctgaaagagagccgcgctcgtttgggtgaaaccagcgaagcgattcttcgtcaaactcgtgagaccgccgcgcgagcggatgattatgttcgcgaaaatccgtggactggggtaggaattggcgccgccgtcgggctggtgctgggtgtcctgctgtcgcgtcgctgattatggcgaatactcaacacacgcagggaccgggtcagcgcgttttctccattggtcagcgcatcgtcacgctgctggtcgaaatggtggaaacgcggctgcgtctggtcgtcgtggagctggaggaggagaaagccaacctcttccagctgctgatcatgaccggactgacgctgctgtttgccgcgtttggcctcatgagtctgctggtgctggttatctgggccgttgacgctcagtaccgcctgcacgtgatgatcgccaccaccgttgtgctgctccttgccgccgcgatcgtgggtatcctaaccctacgtaaggcgcgccgatccacgctgctgcgtctaacgcgtaaagagctggagaacgaccgtgcccttctggaggaggataaatcgtgaatggccgacaggagcgtgaacggcacaaggcgcagctgctgcgccagatccagcagcaacggctggagctcagcgcctgccgccgtcactggcacgaggcgactgcgcccctcgaccgcggctggcatacgctgctgagtttacgttcgtggctgatggttggcagcggtctgatggccgtatggtccgtacgacatccgcattttttaatgcgctggaccaaacgcggactcggactgtggagcacctggcgcctggtgcgcgggatcctgcgccagtcggcagttcgctagcggccctgagcgtgggcgctttccctggcgcccacgctctgccatttccctgtccgttaccgcaccctgttcgcagcaacatgcgccttttccgtagtgcgcccttctctacgacgccctttacctcacgccataccaggaccggtggtggcccatcgcattcggtacgctttcgcctccgcgtactgattactcagaaactttgaaatagatctacagttttccttgctaacaattccctctccgcctcgctactatcctctccatcgacagcaacaccgcgtaactacgcgggattgcactaaaaaacaaaaccgccgccctttgggttttctggagtaaaaaatgaaaaaattagaagatgttggtgtattggtagcgcgtattctgatgccgattctgtttatcactgcaggatggggcaaaatcaccggttatgcgggaacccagcagtatatggaagccatgggcgtcccgggcgcgctgctgccgctgaccatcctccttgagttcggcggcggtctggcgattctgttcggtttcctgacccggaccaccgcgctgttcactgcgggctttacgctgctgaccgcgttcctgttccatagcaactttgcggaaggcgtgaactccctgatgttcatgaagaacctgaccattgcgggcggttacctgctgctggccattaccggaccgggcgccttcagtattgaccgtgtactgaataagaaatggtaagcgcactatactgaatgaatgaaaaaagcgaggagaccactcctcgcttttgctatctgtagtctgaaggaggagcaaagatgggacaattagttgacggcgtctggcaggatacctggtatgacacaaaatccaccggtgggcgttttaaacgttccgtttccgccttccgtaactggctgaccgccgacggcgcggctggccccagcggtgaaggcggttttgccgcggaaaaggatcgctatcatttgtatgtttctctcgcctgcccgtgggcgcatcgcacgttaattatgcgtaaattaaaaggtctggaaccttttctccccgtatccgtggtcaatccgctgatgctggaaaacggctggacctttgacgatagcttcccggaagccaccggcgataccctctaccagcatgactttctctatcagctgtatctgcacgccgacccgcactacaccggacgcgtgaccgtgccggtgctgtgggataaaaaacagcagaccatcgtcagcaatgagtcggcagaaatcatccgcatgttcaataccgccttcgatggccttggcgcccgggccggggattactacccgccagcgctgcgggaacaaatcgatgagctgaacggctggatctatgacaacgtcaacaacggcgtgtataaagccggctttgccaccagccagcaagcttacgacgaagcggtggatgcggtctttacctcgctggagcggctggagcagatcctcggccagcatcgctatctgacgggcaatcagctaacggaagccgacattcgcctgtggacaacgctggtacgcttcgacccggtatatgtaacccattttaaatgcgataaacggcgcatcagcgattacctcaatctgtacggtttcctgcgcgacatctaccagatgccgggtatcgccgagacggtaagttttccgcatatccgtcaccactattaccgcagccataaaaccattaaccctaccggtattatttccattgggccgcagcaggatctcaacgaaccgcacggtcgcgatcagcgcttccgttgatctgtcgggcgccagtgatggcgcccaataattcagaaaacagatatttacccaccattcattcacgtctattcttattgcgatcgcttaaaaaacaagtgattgacggttaattgaggcgtagaaatggactggtatctcaaggtattaaaaaactatataggatttggcggccgtgcgcggcgcaaagagtactggatgtttattctggtcaacctcatcctgaccggcgtattgagcatcatcgataaaatgctgggctggcagcgggctggcggcgaaggcattctgaccactatctatggcgtactggtctttttaccgtggtgggcggtgcaatttcgccgtctgcatgacaccgatcgttcggcctggtggctattgctgctgttgatcccggtcatcggctggctggtgatcctgatctttaactgccagcgcggcaccgaaggcaataatcgcttcgggcccgatccgaaacccttttcctactaatcttcctgctcctcccgctagcgggaggagcgtcttcatcactatctgccggcaaacagcttggggatctcacgcagacaccaggacttcgcttcgcccatactgtcccgtcgccaggccatgataatgtcaatttcattggtgtattccgggctgacgacccgcaggcgaccttcggcaatatccttctccaccagcggatagggcatagtcgccacgcccagtccggccagtagcgcctgacgtttatcttctatcgtactcaccgttaaacgcggctgtttatccagcagttgaacggtgaggacgggccgctcgcgcgcggtatccgccaccgcgacgccgcggtatttcacgcgggtaacctcagagagcggctccggctcctgatggatcgggtgatccggcgccgcgacgtacacgctgagcaccgaatagagtttgcgcgagttaatctccgaagaggaacgaaaatgcatatccggtgcgacaacgatatccgcccgcccctgctccagccgctcccaggcgccggccagcacctcagtgataatcgacagctgggtgtttgatttagtcgccagtttctcaatcagcggaaacagatccggagtgggcaccagcgcttcggtaacgatcgtcaggtgggtttcccaaccacgcgacagggcttcagcatcggtggtgagtttatccgccgcttcaagcagcacgcgcccgcgctccagcagcattcttccaacgttagtgaacttcgtgcgatgacctgagcggtcaaacagcaccacgtccagttcctcctccagtttttgcatggtgtagctcagggcggaaggcacgcgtcccagctcatcagccgcggcagcgaagcttccgcgccggtcgatcgcatccatcacgcgtaacgcttccagcgttaatgctctctctttggccatcgctttctcattcaggaaatttgaacataccgggcagaatatctggctaacaatacagcgtccatacctttaccattgatttagtgtaaagagaggtcaagaacatgattactacccgaacagccaaacaatgcggacaagcagacttcggctggctgcaggcccgctacaccttctcctttggccactacttcgacccgaaattactgggcttcgcatccttgcgcgtcctcaaccaggaagtgctggcgcccggcgcttccttccaggccagaacgtacccaaaagtcgatatcctgaacctgattctggaaggcgaagcggagtatcgcgacagcgacggcaaccacgtgcaggccaaagccggtgaagcgctgctgatcgccacccagcctggcgtgagctatagcgagcataatctgagtaaagagcagtcgttaacgcgaatgcaactttggcttgatgcctgcccgcagcgggaaaacccgctgcagcagaaaatcaatgtcgcagacgcgacgctgcagctgctggcctctccggagggcggggataacagcctccagcttcgccaacaggcctgggtctaccatatcgcgctggagaaaggtgagcagatcaacgtgcaattacatggtccacgcgcctacctgcagtcgattcacggctccgtccatgccgtcgcacaggaacagcaaaagcaggctctcacctgcggtgacggcgcatttattcgtgacgaagctaacattaccctcgtcgccgatacgccgctgcgcgctttgctgatagatttaccggtgtaacaacggaagtgatggagtctgtcagtgagtaagaagaaaaacagaaaaaaggcgtcaccaacgccgttagccccggtgcaaccgcaagtcgccggggccgccagctttggttatgatgagatgcttagcgaactggaagccattgttgccgaagcggagatccgcctgcgggatgaagaaagtctcgcctgaaacggcaaaatggctgggttgattttcattaatggcctgaagaagatatcggccccgcgaggggccgatggcattattcactcagcgcgtcggcaagatcttttttcacctgcgtgcgctgctccggcgtcagtaccttattcacctcaaaatagtacttcacgcggtaataacgcacctgctgatcaatcttgctgaaggccgccagctgatcgttgaccgctttttcatcccatttaccggaatcaatcacgtttatcagagccccgtctttaatttcctgttgggaaatctgctggacattactctccaactgctgatgcaggcttttaattttcgcgacctgatcgttggtaagttttaagtgctgaacaataggatcctgcgccggtgctggcgccgccttaacgtctgcggcctgagccgtgatagagaaaccggtggtcaacagcgtggcaaaggcaatacgggttatcaatttcattttttttcctgaagtaaaggtggcagaaatagcggattattattttacagggcgcagtgaataaatgtaaaaaatgatagccaaacattatatatccacagcagaaatatacttcactaaaacatataaaatatgaatgctgtgttaatttatatatttgacgccctaacatcaccagtttttattttaatttcaacagcaggcaaaatatttgacagcggtgacttttcctttaatttaattagcgcatattacgttatccagcgcatcaaggatatcatttaaaaatagataaggagattgagatgttattacgttttcgcgtattaccgctggtttttgtcatctcgctgttaagcggctgcggcctggcttctaaagccttttattccgcgggagacaaattatttcaacccggagatgacgccgtcgcttcgatgcagacgtattcagtggctcagttcctgcagccgtttactctcaacccggcgaaggccagcagcgattatctgggtaaatgggtcaaggtacgcggggtgattgtcgacattcgtcggaagagcggtatcgccggcagctactattttatcgtgaccatgcgagatgaacagaataaaacggataaacgtcttacctttaattttggctcgcataacagcgcagacgtagaggctttaagcaacggcagcgtcgctacgatcgtcggccaggttcatcaggtgcaagattccacgatcccgacgctacagaatcccaaggtggttaaataacggtagctgaccgataagccgcgttcttttggtatagcgtcgtggatagtcattcatccgcgtcacgggttcagatagcaaaaaccccgccggagcggggttttgacataaaaaaggtgaaactgaccgataagccgcgttcttttggtatagcgtcgtggacagtcattcatcctgtccccgctattcgaatagcaaaaaccccgccgaagcggggcttttgcgtaaaaggtgaaactgaccgataagccgggttctgtcgtggacagtcattcatctaggccagcaatcgctcactggctcaagcagcctacccgggttcagtacgggccgtaccttatgaacccctatttggccttgctccgggtggagtttaccgtgccgcggactgttaccagccgcgcggtgcgctcttaccgcaccctttcacccttacctgatcccgcttgcgcgggccatcggcggtttgctctctgttgcactggtcgtgggctgtgacaccccccaggcgttacctggcaccttgccctatggagcccggactttcctcccctccgcccgtctccccccgaaggaggacgacgacgaagcggcgactgtctggtcagcttcggcgcgcagtatagagggtttaccgcccgttgtcatccctcagtggtcatcccaacctgcagggtggcagcaatattacgcgacgcgcggtaaatattatcaaacgccccgcgaaatgcctcttccagcgtcgaaacggaagttaacacgctgaatacggcatcgataccgtgctggtgaaccacgccgacatcgtgagccaggctgccagcaataccgatcaccggcttacggtatttcttcgccacccgagccacccccaccggcaccttaccgtgaacagactggctatcgagccgcccttccccggtgaccaccagtgagcagtcatggatttgttcttccagcttcagcgcctcggtaacgatctcaatcccgctgcgcagctccgcattgagaaaggccatcagcgccgcgcccatgccgccggccgctcccgcgccggggatcgacttcacgtccacctgcagcgacgtcttaatgacgtcggcataatgcgccagattacgatccagctcgacgatcatcgcctcggtcgcccctttctgtgggccaaagatccgcgacgccccacgctcgcccaccagcggattggtaacatcgcaggccacgtgaatcatcctgtcacgtaagcgcggatcgatggcggaaagatcgatccggctcagacggctcaaactgcccccgccatggccgatctcttgtccctcggcgtcacagaggcgggcgcctagcgcctgcatcatacccgccccaccgtcgttggtcgcactaccgccgatgccgataatgatccgttccgcaccatgctccagcgcctgtaatattagctccccggtaccccgtgaagtggtgatgagcgggttacgtttgtcgggcggaacgagccccagaccgctggctgccgccatctcaataaacgcggtgacgccgtcgccggacatgccccagcaggccttcactctctcacccagcggacccgttacccacgcgaaatgttcctttccctgcgtggcggcaatcatggcttccaccgtcccctcgccgccgtcggcgacgggcagggaaacatactgtgcatcagggaaaatttcccgaaatcctttttctatcgcctgagctacctcgctggcagaaaggctttctttgtaagagtctggggcaatgacgattttcataattttgtagcctgacagcgccgcgcaaggcaagcataacagggcgcgcagggcgcccttcttgttagcgagtgacttccactttcgccagtttttcgtaatagcacgccagcgcgctatggtctgcagtaccgagaccgtccgcgcgcagcgcctgcatcatctccatcaccgccgccgtcagcggcagttgggcgcccacgccgtgtgaggtatccaacgcattggccagatctttaatatgcaggtcgatacggaaacccggtttgaagttacggtccatcaccatcggggctttcgcatccagcacggtactgcccgccagaccgccgcgaatagcctgataaaccagatccggattgacgccggctttagtcgccagggtcagcgcttcagacatcgccgcgatgttcagcgcgacaattacctggttagccagtttggtgacgttgcccgcgccaatatcgccggtatgcactacggagccggccatcgctttcatcagatcgtagtatttatcgaagatcgctttatcgccgccgaccatgaccgacagcgtgccgtcgatggctttcggttcgccgccgctcaccggcgcatccagcatatcaatacctttggctttcagcgcttcgctgatttcccgactcgccagcggcgcaatggagctcatatcgatcaccacggtgcccggtttcgccccttcaataatgccgttttcacccagcgccacctctttaacatgcggagagttcggcagcatggtgatgatcacctcgcactgttcggcaatcgctttcggcgtcgtcgcggtctcagcgccagcggcgatcacgtcggcaatcgcttccgggttacggtcagacaccaccagcgagtaacccgctttcagcaaatttttgctcatcggtttgcccataatgccaagaccgataaaacctactttgattgtcataatgttctctctcttcatcctggtgattattttttaaacgcgtcggcaagtttctgggttgcagaacggaagacgcccagatcgctgccaacggcgacgaaggtcgcgccccattccagatagcggcgcgcatcggcttccactggcgccagaatgccgcttggcttaccgtgcttcttcgcgctggcgaagatatgttggatagcgcgctgcacctcaggatgggaggcattgcccaaatggcctaaggcggcggccaggtcgctcgggccgacaaacacaccgtccacgccctcggtcgcggcaatcgcctcgacgttgtccactccggtctggctctcaatctgcaccagaatggaaatgttcttgttggactgggcgaagtagtccggcacggtgccaaacatattgccgcggtgggaaacggagaccccgcggatcccttccggcggataacgggtcgaagccaccgcctgcgccgcctgttcagccgtctcgacaaacggcaccaggaagttatagaagccgatgtccagcatgcgcttgatgatgatgggttcattggtcggcacacggactacctgcgcgctggagctacctttcagggccatcagctgcggaatgagcgtggtgacgtcgtttggcgcgtgttccgcgtccagcaccagccagtcgaaccccgccagacccagcacctcggtgctaatcgggttagccaaagcgcaccagcagccaatctgcacctgatgcgccgccagcgcggccttaaatttgttcggaaaaattgcgttatccatgatttttaccttgcgttaatcgttgcttacttctgcaattccatacgtttgatatcgccaaccacaaacaggtagcagaccatcatcatcagcgcggagccgccaacaaaaatcagtgcgccattaaatgagtgcagttcgctcacgatatagccaataaccagcggcgtggcgatcgaggccacattgccaaagacgttgaataccccgccgcacaggcccacaatctccttcggcgcgacatccgagataaccggccagcccagcgcgccaaagcctttgccaaagaacgccagcgccataagcgtaatgaccagcggcgtgctggccgtgtagttacacaggatgatggacgacgccagcagcattcccagcacaatgggcagcttacgcgcaaaagtcagcgtgcagccgcggccaatcagataatccgaaaacagcccgcccagtacgccgccagcaaagccaaacagcgccggaatcgaagccacaaaccccactttcagaatcgacattcccttgtcctgcacgaggtagatcggaaaccacgtcaggaagaaccatgtaatggtattcaggaaatactgaccgaaaaatacgcctaacatcattcggttagtcagcaactggcggatatagtccatcttcggcccggccgccggggtggcctcttttttatggtccatatcgaccactgcgccgccttctgagatatatttcagctccgcggcggacattcgcggatgatcggtggggttatgcacaaacttcacccagatgatggtgagcacaaaccctattatccccatcacggtaaagacatgttcccagcccagcgcgaaggtcagccagccgagcagcggcgagaacagagccagcgagaagtactgagcggcattaaagatagctgaagccgtaccccgctctttggccggaaaccaggccgccacaatgcgggcgttggcgggaaacgagggcgcttcggaaaagcccagcataaaacgcataaagaacatggagaccccggcccaggcgagcgggaacacatcaataaagccttgcaggaaggtaaacagtgaccagaaaaacagactgtatgaataaacctttttcgagccaaatttatccagcagccagccgccagggatctgcatcagcaaataagcccagccgaaggcggaaaaaatgtatcccatcgacaccgcgctgagccccagctctttcgcgacttcagtaccggcgatagacaaggtcgcgcggtcgccatagttcactgccgtcaccacaaatatcatcaacagaattaaatagcgggtcggtattccttttttttcatctaatgtagaatccaaaatcatttagacattcctcgggcacagaacaccttttataattgttttaagtggtttctgatttatttaaaagacgatattgaaattgtctattcgcatatcgatcacctcaaaaacatgactcagtataatcagcacgcccccgccagacactatgcatacccacaatataaagttattatttaaatccataattgtgcttatgccataagtcatgggcgctaatccacacttcttacgattgcctgccctgcagaggttagcgtcataaaaaggagtgatgccgatcacattttaaaatcaactcagctgacatcctttattccatcatactgatacgtagcaaatgaattagcgttttattttattattagcacctgtttggagatgactggacaatggctgacattgcaattcgacaacaatcgccgaccgcgttttatattaaagttgacccgacagataatgtggcgattattgtcaacgatcgcggcttaaccgccggaacgcgtttcccggacggcctgacgctcgtcgagcatatcccgcagggtcacaaagttgccctggtggatatccccgcccatggtgaaatcatccgctacggcgaagtcattggctatgccgtacgcgatatcccgcagggaagctggattgacgagtcgctggtggagctgcccaccgccccgccgctgaataccctgccgctggccactaaagtgcctgaaccgctaccgccgctggaaggttacaccttcgaaggctaccgcaatgctgacggcagcgtgggtaccaagaatctgctgggtattaccaccagcgtgcactgcgtcgctggcgtggtcgattacgtggttaaaatcattgaacgcgacctgctgccaaactatcccaacgtcgatggcgtggtgggcctgaatcatctctacggctgcggcgtggcgattaatgcgccggcggcggtagtgccgattcgcaccattcataatatcgccctcaacccaaacttcggcggcgaggtgatggtcattggcctcggctgtgagaagctgcagccggaacgcctgctgcagggcacggaagacgtcaaaagtatcccggtggacagcgccagcatcgtcagcctgcaggatgaaaagcatgttggttttaaatcgatggtcgatgacattctgcaggtcgccgagcgccacctggcgaaactgaaccagcgccagcgggaaacctgcccggcctctgagctggtggtcgggatgcagtgcggcggcagcgacgccttttcaggcgtgaccgccaacccggcggtaggttacgcgtccgacctgctggtgcgctgcggcgcgacggtgatgttctcagaagtgaccgaagtacgcgacgccattcatctgttgacgccgcgggcgattaacgaagaggtcggtaaacgtctgctggaagagatggcctggtacgataactatcttgatatgggcaaaaccgaccgcagcgccaacccctcccccggcaacaagaaaggcggtctggccaacgtggtggaaaaagcgctggggtcgattgccaaatcagggaaaagcgccatcgttgaggtgctctctccggggcagcgtccgaccaaacgcggcctcatttacgccgcaacccccgccagcgattttgtctgcggcacccagcaggtagcctctggcatcacggtgcaggtattcaccaccggtcgcggtacgccgtacggactgatggcggtaccggtgataaaaatggcgacccgtaccgagctggccaaccgctggtatgacttaatggacattaacgccgggaccatcgccactggcgaagagacgattgaggatgtcgggcggaagctgttcgaatttattctcgacgtcgccagcggacgcaaaaaaaccttctccgatcaatggggcctgcacaaccagctggcggtatttaacccggcgccggtaacctgatcgagagcgtaaggatttaaccacttttagcccggatctatccgggcttgttggttagggatgctgggcggcaagaaaagcgctgatctccgcctgcgtcgaggtgccttccatggggccgcgttggctaatcgccagcgagccgctggcgtttgcccatctcagcgcctcccggggcgtggcgccattgaggaacagactaacaaaagtggcgccaaagcaatccccggcaccagtcggatccaccaccggcacgctgaagccggcgacatggtgcgtctcgttggcgctaaagtagcttgcgccacgcggcccgcgtttaatcaccacatgcttcacgccgcgtttcagtagcttatcaaccaggacctgctcattgcgttccggattgagaccaaagtaatccagctcgccatcgctcggcaggaagatatcggtgtagtcgaggatatattcaaaggcctgcgacatctccgggatgttcagcatctctttgcgaatatttgggtcgaacgatactgtgccgctgcggcctttaatgttttcaatcgctttacgcatcgcatcgataatacggaacgagaatagcgatgaccccataatatgaaaatgctgacactgatttagcaacgcttcgtcaatgtggtcggcagtcagcagaccgcaggcgctgttaggcatattaaaaataaaatcgcgctgcgcctggctacgatagctgacgaaggcgctaccggtagtcgctttctgcagcatagcgatgccgttgacgttgacgccgtctttctccagccgcgcaatattcatctcgccaaatgcgtcgttgcccacacagctaaacaacacggagccgaaacccagctttgccacctgatcggcaaatattgccggcgccccgctgggatagggcccccaaaattcaccgggacgggaaaacccctgattctcttccttggcgagaaactccaccagcagctcgccgatggtgcaaatggttacgttcatcaccgctcctggtttgtcttatgcaaagccgtgttgagccatgtcaggcattcattgttggtatagctgttggtcaaacccgcggcgaggaagcaggcatggtactctgccgcgacgacctgaggggtcacgacgctgctgatctgctgtaattcacccacagcataacgtttctcgccatagaccggccgggaagcgacaatcgcaatgactcgtttactctgggccaccgcttcgcttaacaaatgtgccgtaacctcgttacgcacgcttagcgtgccgtcttcagcaatgtggtccaccgctatcagcgcacgtgaagggcggtaatgacccaacgccttcagcgccagttcgccctccacaatccgcccctgaccggacaacaccccgccaagcagaacggtttccccatttaaaaactcctgcgccagcgcgacgtggcccagatcatttaatagcaggcaaagctcttctctgttggccagaaaggggatcactttacgcaaaatggaaccctggcctagaaacagcgtttcgccattttctatctgcgccgccacctggcgagccatttccgtctccagcgctttatctctgacggcaggcgcttctcgggtcatcgcaaccggcgcgccagcctgggcggtataaatcgccccgccaaaagagcgtttcaagtagccctgctgctcgaggtagttgagatcgttacggattgtcaccccggaaacagccagcatttctgccagatcgtcgactttgatctcgccgttcttacgaacgatctctgcgatgtccaagcgccttttcagcaagctggttgacggttttgccacggtttatgccttattattttctcctggaataactttcatttttaaatttccctcttgcaatgtcaaaccgcggctgtagccctatcccgccatcaatcagcaaatcgatattaatcatgtagttacaaattggcaccttaccaacttaaactttaaaaaagaaaccttataaatactattaactttcattttaaaaatcaattcatcattgtgtgcggtggatcacacctaaaaggcgagacgatcgttacattactttcaaactgaaggttattaaccaaaaataacttacaagatgaaaacagaggactaaaatgtacatcatttccagtaaaaacatgctattaaaagctcagcgacagagttatgccgtgccggctttcaatatccataacctcgaaaccatgcaggtcgttgttgaaacggcggctgagttgcgctcccccttgatccttgccggcacccccggtacctacagctatgccggcaccggcaacgtggtggcgatcgcccgcgatctggcaaaaaagtgggatctcccgctcgccctgcacctcgatcatcacgaggatctggctgatatcacgcgcaaagtgcaggcagggatccgctcggtcatgatcgatggctctcactcaccgttcgaggagaatgtggcactggtaaaaagcgtggtggagttgagccaccgctatgatgccagcgttgaagccgagctgggccgtctgggcggagttgaagacgatctggtggtcgatgctaaagatgcgctctataccaaccccgaacaggcccgcgaatttgtcgctcgtaccggtattgattcgctggccgtcgccattggtaccgcgcacggcctttacaccgccgaaccgaagcttgattttgagcgcctggcggctattcgcgactgcgttgacgttccgctggttctgcatggcgcttccggcctgccggatagtgatattcgtcgcgccatttctctgggcgtatgcaaagtcaacgtcgccaccgaactaaaaatcgctttctcggatgcgctgaaagcctacttcctggaaaatccgggcgccaacgatcctcgtcactatatgaaaccggcgaaagcggcaatgaaagaggtcgttcgcaaagtcattcacgtttgtggctgcgaaggacaactgtaatcagcggatcgaaggagccttgttgtgatccacaccctgacactgaataccgcgatcgatatgaatatcttttgcgatccgctccagccggcggcagtcaaccgcacccggcaaacggaatattgcccgaatggtaaaggggttaacgtctcgctggtattacatcattaccagcagccaacccatgtcatgggcatattcggcggttttaccggccgctatatcgttgaggaactacgcaaacagcatattaatgtcacaccggcatgggtcgctgaaccgacccgtataaatatatttattaacgacggcagtgatgaatacaaactggtaaatcccggcgcgcggattgacgatgaaggaaaagaacaaattcttcaccatttacagtgcgtcgcgcccggtgattatttagttatcagcggcagtctgccaccgggaatagagagccggttctatagcgagattctggtgctgtgccagcagaaagggtgtgaagtcatcttagatatcagccacccggtgctgcgccagctgttagagtggcgtccactattgattaaacccaatgacgacgagctgaaagagatctttggtctggatgtcagcagcccccggcgggtacgcgaagcaatgcaaacgctccaccagctcggggctcgcaatgttctgctgacccttggcgcgcaagggctctatttttcgaacggcgcgcaactgtggttctgctcggcaccgaaaatcgaactggtcagctcggcctgcgccggcgatgccgcgctgggtgcattcctcagccattggcttaacacagacgatattccccaggccctggcgctggccagcgccaccggcgctgatgtggccgcctccgccgggctgggtaaattaaaccgtacgcaagaattattacaacaacttcagatcgtccaattataaaggtccgattatgaaaaaaattattgccgtgaccggctgccctacaggtattgctcatacatttatggctgaagaggccttaaaaaccgcagcgaaaaaattaaacgttgaaataaaagtcgaaaccaatggcgcttccggcgtagaaaacgccattacgccggaagacctgaaggatatttatggcgtgattatcgctgccgataaagatgttaatgccgaacgttttaatggtttaccggttattgaggtgccggttaaagaagccattcatcatccggcggaattaattaataaagtcgttaacggtcaggcgccgcgtcgtcagggattctccgcggcaacggatccagacgagaaatatgagcgagaatcgttcggccgacagatttacaaacatctgatgagcggcgtttccaacatgctaccgttcgttgtcgccggcgggatcttaatcgctgtatctttcttatggggcatctactccgccgacccgaattcaccgcagtataacgtgattgccgccacgctgatgaaagtcggtcagcaggcgttctcgatcatggtgccggtgtttaccgcctacattgcctggtcgatatctggccgccctggcatggttgccggttttgtcggcggtctgctggcgaacgccaccggcgccgggtttctcggtgggatcatcgccggttttgccgccggatattttatgctgctgatccgtcatctgctcgacggtctgccgcgccagtacgaagggctgaagtcgatctttattatgccgctgatcggcgtcctggtgatcggcgtgatgatggttctgctcggccagccggtggcagcgatcaacaatggcatgatgaactggctcagctctttacaggaagccaacccaatcctgctggggatcgtggtaggcgcaatgtgctccttcgacttcggcgggccggtcaacaaagcggcctatgtcaccggtacgttgctgctgggtcaaggtaactacttctttatggccggtgtatctgccgcctgcatcacgccgccgctggtcatcgctctggcgaccacgttctttccgaaaggctttagcgaggaggaacgcgccgccgggatggtcaactatatcctcggctgcacacacattaccgaaggtgcaattccctttgccgccaaggatccgctgcgggtgatcccgatgatgatgatcgcctcctcaatttctgcggtactcagctacagcctgcatattcaggttccggcaccgcacggcggcttcttaatcctgccgctggtcagtaaaccgttgatgtgggtgctgtgcattctcgccggttccgcctgcggggcacttatgctgggatgctggcggctgtggcaaaaacgcactgacaaagcgacagctcttgctggcgccatgaaataaggagcaagctatgcaactgacttctgccgatatttgtttcgatcgtcaggtcaaaacaaaagacgaggcgctacagcgtgtcgttgcagccctgacccatgccggacatacgcgggcagactatctacaaggcatgcgcgagcgcgaggggcaaatcagcacctatctgggcaacggcattgccattccccacggtacgccgcacagtcgcgacgcagtgcttaaaacgggcgttaaggtgctggcttgtccgcagggggttgactggggtgaggagcaaaccgcctatctgattgtcggtatcgcggctcaggacaatgagcatctcgatattttgcgccagctcacccatgctctgggcgatgatcgagtacctgaggcgctgacgcgcgctgataccccccaggcggtgctggaaattctcgccggcgacattcctctgccagcaggcgaagaaccacaacccgcgccgcaatttgacgaagaggccacctttaccctgcgtaatccgcacgggctacatgcccgtcccagcgcggtgctggtgaaagccgtcaagcagtggcgatcgcaaatccgggtcgaaaaccttgatacgcgctccgccattgttgatgccaagaatctgatgcgcgtcgtatcgctgggcgccaaacagggtcatcgtctgcactttatggccagcggcaacgatgcgcagcaggcgttaaaagccattggtgacgcttttaacgccggtctcggcgaaattgccgcccagccgcagcaggtctcccaggaagccgtcaaaacgaaacgcagctggctatcccgaatatttagttaattttcaatcaattaaaaacgccctgtcttcgtgatcagggcgtttttgtctcgaaagacgatacctttcactgcgttacaccactatttatcgatacagatcacaaatcaaaacaaagccatttgcgaccaaaacaaaacataacgaatatattcgaaagaaaacggaggttgtaaatgaaagacattatcactcgccataagtcaggcgaacatatcggtatctgttcagtatgttcggcgcatccgctggttatcgaagcggcgttacgtttcgacctgtcgaccaacaataaggtgctgatcgaagcgacgtccaaccaggtgaatcagtttggtggctacaccggcatgcagccggccgatttccgcgacttcgtctacaacatcgcgcgtaccgtcggttttccggcggagcgcattattcttggcggcgaccatcttggaccgaactgctggcaagacgaaccggccgccgtggcgatggaaaaatcaatcgacctgatcaaagcctacgtcgccgccggctttagtaaaatccatctcgatgcatcaatgtcctgtgctgacgatccggtgccgctggatcctggtgtggttgctgagcgcgccgctcgcctgtgtcaggctgccgaagagaccgccagcgatgagcaaaagcgccacctgacctacgtcatcgggaccgaagttccggttcctggcggcgaggccagcaccatcggcagcgtacatgtcacccgggcgcaggatgccgccgcgacgctcgaaacccatgaagccgccttccgtaagctggggctcgacgccgcgctggagcgagttatcgccatcgtcgtgcagcccggcgtggagttcgaccatacgcaaatcattcattaccagccgcaggaagcgaaagcgctctccgcctggatcgaaagcaccccgatggtctacgaagcgcactccaccgactaccagacccgccaggcttatcgtgcgctggtccgcgaccacttcgccattctgaaagtcggcccggcgctcacctttgccctgcgtgaagccatctttgccctcgcccaaatggaaaatgagctgatcgccccggagtctcgcagtcgcgtgatggaggtgatcgacgaagtgatgcttaacgaacccggctactggaaaaaatactatcgccccacctggagccaggcgatggtcgatatccacttcagcctttccgaccgtatccgttattactggccgcatccgcgtattcgccaaagcgttgagaaacttatcgctaatctgaccgacgctaaactaccgctggggcttatcagccagtatatgccggtgcagtttgaacgactgtcgctgaatgaactgaacgccgagccgcacgcgctgatcctcgacaaaatccaggatgtcctgcgtgcctatcgctacggctgttcttctgaaaccgcgtgaagttaagaggatatatgagtcaactgtttgttcgtaccggcattcatttcagttccagtcagcaggcactggaacacattggcgcagagatgctggcgcgaggcgtcgtacatgacagctatcccgccgccctgctcgaacgcgaagcgacttttcccaccggcatcgccctggagaagcatgctgtcgctatcccgcactgcgaagcgatccacgcgaaatcaccggccatttacctgatacgtccggacatgccggtctcttttcagcgcgctgacgacgacggcgaaatcgacgtttcgctcatcatcgcgctgattgttgaaaacccggcggcacagctgaagctgctgcgccggttatttagtgagctacaaaatccgcacacgctggaggcactgctcgccgcttccgacgatcggctgccggtgcggttccagcaattaatccttgagcccgagcttagcgccgtggcttcataagatactgataataaaaggggtaccctatgaaacgtaaagttatcgtcgcctgcggcggtgccgtcgccacctccacgatggcggcagaagagattaaagagctatgtgcagaccacaatattgaactggatttggtgcagtgccgggtcaatgaaatcgaaacctacatggacggggcggacctgatctgcaccaccgcgcgcgtggagcggaccttcggcgacattccggtggtgcacggcatgccattcgtctcgggcgtcggcattgaagccttacaacagaaaatcctcggcatcctcgcggagtaaacgccatgtttagcgaaatcatgcgttatatcctcgatctcggtccgacggtgatgctgccgatcgtgatcattatcttctccaaattactggggatgaagctcggggattgttttaaatccggtctacatatcgggatcgggtttgtcggcatcgggctggtcattggcctgatgctcgactccatcggcccggcggcaaaggcgatggcggagcatttccagattaatcttcacgtgatagacatcggttggccgggttcatcaccgatgacctgggcgtcgcaaatcgccctggtggcgatcccggtggccatcgcggtcaatatcgtgatgctggttacccgtatgacccgcgtggtgaatgttgatatctggaacatctggcatatgacctttaccggcgcaatgctgcatatcgcgaccgggtcgtactggataggtattctcggcgtggtggtgcatgctgcttttgtgtataagctgggcgattggtttgccaaagatacccgcgatttcttcggcctcgagggtattgcgatcccgcacggcagttcggcgtatttagggccagttgccgtcctcgtggataccatcatcgacaagatccccggtcttaaccgtattcactttagcgccgatgacattcagaaacgcttcggccccttcggtgaaccggttaccgttggcttcgtcatggggctggtgattggcgcgctggcgggttacgacctgaagggcattcttcagctggcggtgaaaaccgcagcggtgatgctgctgatgccccgggtgatcaaaccgattatggatggcctcaccccgatagccaaacaggcgcgtaaacgtctgcaggctaaattcggcggccaggaattcctgattggtctcgatccggcgctgctgctcggtcatacctcggtagtctcggccagcctgattttcatcccgctgaccattcttatcgccgtcgtggtccctggcaaccaggttctgccatttggtgacctggccaccatcggcttcttcgtagcgatggcagtggctgtacatcagggcaatctgttccgcacgttgatttccggggtcatcattatgggaatcaccctgtggatcgccacccagaccattggcctgcacacccagctggcggcaaacgccggggccctgaaagccggcggcatggtggcctcaatggaccagggtggttcgccgattacctggctgctgatccagctctttacctggcaaaatgtggttggcttcgcggtcatcggcatcatctatctggccggcgttctactgacctggcgtcgcgctcgcggcttcatcgccgcggaaaaagcagaaaaaagcgctgccccgcaacaaagtacaggcatgtcttgatctaaaaggggagcgttcgctcccctgaatcttatagctggagaatgttatgaaatcagtggtaatccatgctgaggggaacgtctgcgttgaagaacgccctatccccacgctgcaaacggaaaacgatgtcctggtcaaagtggtcagttccgggttatgcggctccgatatcccgcgcattttcgccaaaggggcgcattactaccctattacgctggggcacgaattcagcggttatgtggaatcctacggcgcggcggtaaccgacctgcagcccggcgatgccgtcgcctgcgtgccgctgctgccttgcttccagtgcccgcaatgccagcgcgagtatttctctttatgtaaacagtatcagttcgtcggctcacgcagcgaaggcggcaacgccgaatatgtggtggtaaagcgcgccaacctgttccgcctgccggaccagatgccaattgatgatggcgcgtttatcgaaccgataaccgttggcctgcacgcttttcatctggcgcagggctgtgaaggtaaaaacgtgattattatcggcgccggcaccatcggcctgctggcgctacagtgcgcccgcgaactgggcgccaacagcgtcacggcgatcgatatcaatccgcagaagctggagctggccaaaaccctcggcgcaacccatgtgttcaacagtcgcgagatgagcggccaggcgattcagcaggcgctggaatccattcagttcgaccagttagtcctcgagaccgccggtacgccgcagaccgtcgcgctggcgattgaggccgccggtccgcgggcgcagctggcgttggttggcacgcttcatcacgatttaaccctcccggcagccaccttcgggcagattctgcgtaaggagttgaatattgtgggtagctggatgaactactctggcccgtggccgggagaagagtggcaaacggccacccgtctgctgactgaaaaacgcctgcagctggcgccgctgatcgcccatcgtggcgacgcagaaagcttcgctcgtgcagtgcaggcgctcaacggcgcgccaatgcaaggcaaaatcctgctcaaactctcttgaccgcccgagccagccatcagcgctggctcatccaacctttcgaaaattatcgttcacctttcgttacccttcgattacactgagatgagttaattatcaggcaaatcaagatgaactcatttgaacgaaggaacaaaattgtcgatatggtgaatacgcagggtagcgtattggttctagacctttcgaatctctttggcatctctgaggtaacgatccgtgccgatctccgcttactggaagaaaaaggactgttaacccgttttcacggcggcgccgcccgtgcgggtagcgacctgaccgacgccgagaatcaggaagtggtgcttgaagaccgctatcagcttgccagcgatcccaaaaagcgcatcgcccatgccgcggcagcgatgatccgtgaaggtatgacggtaatcctcgatagcggtagcaccactcttcttatcgccgaggcattagtacggatgaccaatatcaccgtcatcaccaacagcctgcccgccgcgtttactctggcagaaaataaagatatcaccctggtggtgtgcggcggtaccgtgcggcacaaaacgcattcgatgcacggcacgattgccgaacgttcgctgcaaggtatttgcgccgatttgatgtttgtcggcgccgacggtatcgacgccaccaatggcatcaccacctttaacgaaggctactccatcagcagcgtgatggccgccgccgcgcatcaggtgatcgccgtgctcgacgccagcaaattcaatcgccggggctttaaccaggtactgccgatggaaaagatagactgcgtgatcaccgacgacggcattagtgaaaatgaccgtgcagcgttaagcagcaaaaaggtggaactgaagatagtgtaattgcacgctgagtggaacatcatggcggctggttctacttaaccagccagcttccaccttttttggcgcctatgcgaatcaatctccctttcgcctgtagcccttgcagatgacgctcaaccgtacgtgctgatatccccaagatctccgccagcgctctcgccgttaattccggcttttcggttagcaaacgcaaaattgcgttttccggtggggctaatttgacgtcgatttcttccgacatttcttccgacatttcttccgacacgatgaatgaagtttccagaccttctttcagcgccgccaggatattttgcaacatccaggtcacgaatagcgtgcaatcactggttttatcacaagcacctaaaatgtcgtaataacgttcttgctgatggtggatcagcgtttcaaccggcagccaggccaattcctgacgccactggcttagaatcaacgtctgccataaacgccccatccgaccattgccatcagcgaaagggtgaatgaactcaaactcgtagtgaaaaactgaactggcaattaaaggatgtagctcggtgtgttccagccaactgagtaaatcagcgatcaatcttgggacctgggcagcaggcggagccatatgtatcacctgcgtaccgcgataaatgccgacgtttccgccacgtaaagcgcctggacgatcaaccagcccggtcatcagcgttttatgcgccgtcagaagatcgctaatgtttgccgcatgccatccgggcattaattcataagcacgaatggcatttctcacttcctgaatatccttagccggcgccagaacccgtttgccttccagcagcgccgttacctgttccatgctcaggctattatgttcaatcgcgagtgacgcctgaatagtacgaatgcggttttctttacgcagcaacggcgatgcttgtccacgtttcgccgaccaatgcccaagcaattccccaatctcaacgacaaggttgaggaccgagggtgtgatgctaaacggcggttggtaacggctcatcgtttactccccctgctgctccagggcgtacttatacaacgcgtttttcttcacgccgtggatttccgcggccagcgcggcggctttcttcagcggcagctccgcctgcagcagcaccagagtacgcagcgcggccgccggcagcgcctcttcctgagccttgaaaccttcgacgatcagcaccatctcgcctttgcgacggttttcatcttccttcacccacgccaccagctcaccaatcggcgcgccatggatcgactcccaggttttggtcagctcacgagccagcaccacatagcgggattctcccagtaccgcgcagatatcctccagactctccaccagacggtgggtcgactcatagaaaataagggtgcgcggctcttcttccagcgctttcagggtatcgcggcggcctttcgatttcgccggcaggaagccttcataacagaaacggtcggaaggcaggccggcggcgctcagggcggcgatagccgcacaggggcccggcagcggcaccacgcgaatattcgcttcgcggcaggtgcgcaccagatggtaaccaggatcgttaatcagcggcgtgccggcatcggaaaccagcgcgatgttttgcccttctttcagtttggcaagcagggtttccgccttttgctgctcattatggtcgtgaagcgcaaacaaacgggcgtttatcgcaaaatgttgcagcagcaaaccggtatgacgggtatcttccgctgcaattaaatcaacggcttgcagcacttccagtgcacgctgcgtgatatcagacagatttcctatcggagtgggcacaatatagagctgcccctgagaattatccgctgattcgtgttgtttcattgtctcgtccgtattgccgatttaatattgagcattgagccaaaaaaatatcactggacacttatggtaccgtcaacatttcttcgttctaagcccgcgcgctgcctgcccgtattgctggcgactcttatttttgctggctgcggcacccacacgcaggatcaaagcgcggcgtttatgcagggtacgtcgcaggccaactccagtttctacttacagcagatgcagcaaagcacgaatgatagcaagaccaactggcaattactcgccattcgtgcactactgcaggaagggaagaagcagcaggctatcgacctgtttaaccagctgccggcgaacctgaacagcactcaggcccgtgaacagtcgctgctggcggtggaagtgaagctggcgcagaacgattatcaggccgcccgtaatctgctggctaagatcgatccgacaaaccttgagcagcctcagcaggcgcgctactggcaggcgcaaatcgatgccagccagggtaaaccatcgctgaccctgctgcgcgccttaatcgcccagcagccgctgctgagtgacgccaaacagcgtcagaaaaatattgatgcgacctggcaagcgctcacctcgatgccccaggaccaggccaatgcgctggtgatcaacgccgatgaaaatatcctccagggctggctggatctgcagcggatgtggtttgacaaccgcaacgatccgacgctactgaaagcgggcgttaaagactggcagacgcgctatccgcaaaacccgggcgctaaaatgctgccgacggcgcttgtgaatatgcaaaactataagcctgcgtccatcaacaagattgcgctttttctgccgctgaacggtcaggcgtcgatcttcggccgcactatccagcagggctttgaagccgctaaaaacggcgcgccgtcggtgacgggcagcgcggttcccgcccaggtcgcccaggcggcgaatgtctccggtaatgatgatgtggtgagtccgtcgcaggcagaaatcagcgatcttaccgccaccggaagccgcgcggatccggttcaggccccgacgcaggaccaggcagcgcctgctgcggaaccggcagcccaggcgccggcaacatccaccacgccgcagactaccgcttccccggccacccagccggttaccgcgccggccgcacagccgcagcccgtggtcgcaaccgccgctaacccttctgcggaactgaaaatttacgacaccaccacccagccgataagccagctgctcgcccaggcgcagcaggatggcgccaccctggtggttgggccgttgctgaaagaaaacgttgaagaggttatcaagagcaacacgccgctcaatgtgctggccctcaaccagccggaaaaagtcgaaagccgcgctaacctctgctatttcgcgctttctccggaagacgaagcgcgtgacgccgcccgacatatccaccaacaggggaaacagaccccgctgctgctggttccgcgcggcgcgctgggcgatcgtgtggttagcgcttttgccgacgagtggctgaagctgggcggcgccagcgtcctgcagcagcgttttggatccacggccgagctgcgcgccggcgtgaacggcggcgggggcattgcgctgagcggcaccccggtctccaccctgccatcagcgcagaacagcatcctcggcagtgcggatgagatgccggtaagcagcggcggcagcgtcgatgcggcctatatcctcgccaccccggaacagattgcctatatcaaaccgatgatcgccatgcgcaacggcagccagagcaatgtcaccctgtacgccagctcgcgcagcgcccagggcaccgcggggccggatttccgtctggaaatggaaggcttgcagtatagtgagatcccaatgctggccggcagcaatccgtcgctaatgcagcaggcgctgtccgcggtgcgtaatgactactcgctggcgcgtctgtatgccatgggcgctgacgcctggtcactggcaaatcacttcacgcaaatgcgccagacgcctggcttcgagctgaacggcaataccggcgatctgacggccaaccaggattgcgtgattaacaggaaactgtcatggctcaagtaccagcagggaaaaatcgttccggccagctaagcaaacagaccggcgatgcctgggaaaaccaggctcgccgctggctggaaggccagggcctgcgttttatcgccgccaatgcccgcgagcgtggcggcgaaattgaccttatcatgcgcgacggcacggtcaccgtttttatcgaagtgcgctaccgccgtagcgcccggtacggtgatgcggcagccagcgtcactccgcaaaaacaacaacgactgcttaaagccgcccgtttgtggctctgccgacagaatgggagctttgagactgtggattgccgtttcgatgtggtagccttcaccggaaacgacatccaatggctaaaaaacgcctttggcgaatagcgtaataccagaagtaagggatcccgtgctcgacagaatcaaagcctgctttaccgaaagcattcaaacccaaattgccgcagcggaagcactcccggacgccatctcccgggcggcgatgacgctcgtccagtccctgcttaacggcaacaaaatcctctgttgtggtaatggcacctccgccgccaacgcacagcattttgctgccagcatgattaatcgctttgaaacggaacgccctggtttacctgccattgcactaaataccgataatgtggtcttaaccgccatcgctaacgatcgcttgcatgacgagatctacgccaagcaggtgcgcgccctgggacacgccggcgatgtgctgctggcgatctctacgcgcggaaacagtcgggacatcgtcaaggcggtggaagccgccgtgacccgcgacatgaccatcgtcgcgttaaccggctatgacggcggtgagctggcgggcctgttaggtcaacaggatgtcgaaatccgcatcccctcccatcgcagcgcgcgtatccaggagatgcacatgctgaccgtcaactgtctgtgcgatttgatagataacactctttttccacaccaggacgattaaggagaacacatgaaggctctctcgcccctcgccatcctgctttctgcactactgctgcagggctgcgttgccgccgcggtagtcggaacggcagcagtcggcaccaaagccgcaacggacccgcgtacggtgggaacccaggtcgatgacagtaccctggaactgcgcgtcaatagcgccttgtcgaaagatgaacagattaagaaacaggcccgtatcaacgtcaccgcttatcagggcaaagtcctgctgaccggccagtcgccgacgccggacctctccgcgcgcgccaagcaaatcgccatgggcgtggaagggaccacggaagtgtttaatgaagtgcgccagggccagccgattggtttaggcaccgcctcgtctgatacctggattaccaccaaggtgcgttcgcagctcctgagcaccgatcaggtcaaatcctcgaacgtgaaagtaaccacggaaaacagcgaagtcttcctgatggggctggtgaccgaccgcgaaggccgggcggcggcggatattgccagccgggtaagcggcgtatcccgggtgaccaccgcctttagctacattaaataaagctgcagtttcccggctggcgctgcgcttagccgggctaccgccccctgtccgttgtgtgccgggtaaggcgtagccgccacccggcatccaatccggctatgcgtacgtttacggcaaactacaccagcgccagcgcaccgacaatcgccccgcacagcgccaccagtccgcccgtcagccacagcgctttggccgggaaggctttacgcagcataatcagcgacggcacgctcactgccggcagtgtgatgagcagcgccagcgcgggcgccgtccccatacccgccagcatcatcgactgcacaatcggaatttccgccgcggtagggatcacaaacaggcagccggcgatcgccatcgcgataacccagaacaacgtattatccaccacgccatcggcgtgcgggaacagccagacgcgcgccgctcccagcaccagcaccgcgaggatataaaccgggatcgtgttccagaacagcgtccacagcgcccgcagccagcggctaaagaagccgccctgagtcgcttccgacggtgcagcaggcaccgctaccggctgcgtcgccgcctctttcacccatttctgcaccagcgtcgccacagttaatactgtcgccagacccgccaccaggcgaaccagcgcaaactgccagcccagaacaaagcccataaacaccagcgtcgccggattgagtagcgggttccccatccagaacgccagcgccccgcccatcgacacctgctgtttgcgcatcccggccgcgaccggcgcggcgcagcaggtgcacatcatgccgggcagcgagaaaatcgctcccagcagcgtgccctgaaaccgcgattgtcccagggtgcgtagcagccagtcgcgcggaatgagtacctgaatcaacgacccgagcagcacgccgagcaccgccgctttccagacggcaaggaagtaaaccatcgcatagtcccacgccgccatcagcgggttagcgtcggcctgggcgagaatagatttaccgatactgtgggtttccgcagcggtgaaggctttcccgtagtacggctgccatttgacgtaccacagaccaacaatcacgacgagaaagaaaagcgcgggtttccaccattgaaatggtgacgccgcctgagatgaagactgaccagccatagcattccccagcaagaaatgtggatatgaattgaagccgtgaatactacgccggaagcctgcgtttgcaaaccgctattcagcctgccgcgcggcgcgctcccgtagttccgatgatgtcagaattcgcaccccttcgtgggtgggcgacagcgcctccgccagcagggcgatcgccacatcgcgggccgcaatggatttccagttccccggcaagagccggaacaatggtgcgaggaaggtctcattggcccgctttttttcccgctcgcctgacagcatcgacggcctggcgatggtcagccgcggccagtcttgctcaatcagcgccgcctccatttctcccttcacccgattgtagaaaaacggcgagtgggcgttggcgcccatcgcgctaaccaccagcatatgttgcgcacccagtcgtttgccggtcagcgcggtatcaaccaccagcgtgtagtcagcatggacgaaggcctctttgctcccggcctcccggcgcgtcgttcccaggcaacagaagacgatatccaccgggtcaaccacctgcgccagggcatcggtcagctggggatcgtgaggattaaagacaccttccgctggcgccagcgggcgacgcgtcggcgcggcgatggtgcttatacggggctcattctgcagcagccggagtaagtgaccgccaactaacccggtcgcgccggttaataatacctgactcattggttctcctttacagaattctccgccttgcactttcaggctcatgttccaggcttaataccttacaaggtaagtatccaccatcatcatggaattacctcattgaccatccagacagtggaggaagcatgagtaaaaagatagccgtcctcattaccgacgactttgaagattctgaatttacctctcccgccgaagcctttaagctcgccgggcatcaggtcatcacgatcgaaaagcaggctggcaaaacggtgaagggtaagcagggagaagccgaggtcgccatcgacagagccatcgatgacgtcacaccgggtgaatttgatgccttattgctgcccgggggctactctcccgaccagctgcgtggtgatgaacgcttcgtcacctttacccgcgattttgtcaacggcggtaagccggtgtttgccatctgccacggcccgcagctgctgatcagcgccgatgtgatccgcggacgtaagctcacggcggtgaaaccgattgtggtggatgtgaaaaacgccgggggcgagttttacgaccaggaggtggtggtcgataacgaacagctggtcaccagcagaacgccggacgatctaccggccttcaatcgcgaagcgctacgcctgctcggcgccggcatcacgccgccagtgtaattttttcccgaaacccagcgtgttgtcggtaaatttgatttcgtccggacgaatctcccataccggcgccgacagcatgcgggccaccgggaagcgcttgacgtagcgctggcgcattcgcgcctcttcgtcaccgctcagacgacggatctcgcctttgaactgcacgccgcggatcagggccaccgtttttggctggccgttaaccgtgccggccaccttcgccctctgtccggtcatctggccatggcgggtgtgctcctcgctgagcagataaaaggccacggtatccgggtcatagacgtaaaaggcattcgcgcaccacagctcgtcttcacgggagacgcaccaggtgacgacgtgctgtttactcagccagcgaccaatggcggcaagcgtatccatctttcttctccattatgctatggtgcacacaccttaccatagtgactttgtgaccgtgtgctggtttctgtatctcattcgaaccgcggataatcgcctttataccggcatcaccaccgacgtgccacgccgctttcgccagcatcaggcgggaaaaggcgcgaaggcgttgcgcggcaaaggcgacctgcagctggcctttagccacgaagttggtgaacactcacttgcattgcgactggaatatcgcgtcaagcagctaacgaagcgcgaaaaagagcgcctcgttgccggagaggatgccttcgaaaccctgctggcaaggcttaaagacgattaaagtgctcgctgtattctacctggccatggacgccgtcgagggcgtcatccgccagacggtgaacctggaacgcctcggcgctgtccggccagcggcagcggagatcgaagcgcgcggccggttcaaagccgaagcgacggtataaatccgggtcgcccagcgtcaccaccgcggcgtagccaaactcattcagcgagtccagcccttcataaaccagctgccggccaatgccctgtccgcggtagcgttcatctaccgccagcggcgccaggccgacccactgcagctcttcaccttccaccgccaccgggctgaaggcaacgtagccgatcacctggccttcatcatccgtcgccactacccccagcgtgatcagtccatcttcacgcagatcgtgcaccagctgcgcttcggcatcgcggccgaaggtacgacgcagcagcgcgtcgattcccggtgcatcaatcccaatctccactcgaatcagcatgcctcacctaccgatgtctgttcaggtttctgcgggctcttcagtccagcttcgacaaaatccgccagttgcagcaacatcacgcgcagcgcttttggcatctgctcgagctcaatggcgtccatcaaattttttacatacagccccagctccgtatcgccttcaatgaccagacgacgctggaagaatagcgtatccggatcctgcttgcgcgcggcgatcattaacagatcgctggcgtcggcgctgaagctgacgtcggcgtcggcctgctggctgaccaccagtcgaccatcgactaccgaggtataccacagcagaccgatgtcacgcacatgaatacttaaccaacgcccctcaagaaactccagctccccctccgccagcgcctggcgaaactgccagctcagcacttgctccagcacctggcgcttgagggcaaaaggcgccagcttaaccggcacgctcattaaagacgggccaaagtggaccagccgggaacgcagtttatccaacacaagctttactccatgaatgcaatagttccgctattgtgccatatcacataaacaacatagcggcgtaaatcaacaaaaacgcgatgacggccgccagttattggcgccgccaatacacttttaactgcctcaaatcaaaaattgtcaccagaaggttaactaaaatccctgctcgttaaccattcagcgtccctgacgggccgcatttttcaggaaaaattatggagctgctctgcccagccggtaaccttccggcgcttaaggcggccatcgaaaacggcgccgatgccgtctatatcgggctgaaagatgacaccaacgcccgccactttgccggccttaatttcaccgaaaagaaactgcaggaagccgtcagctttgtgcatcagcaccgtcgtaagctgcatatcgccatcaataccttcgctcatcccgacggctacgcccgctggcagcgagcagtggatatggccgctcagctgggcgccgatgcgctcattctggccgatatcgccatgctggagtacgctgcggagcgttacccacacattgagcgtcacgtttcggtgcaggcttccgccaccaatgaagaggccattcgcttctatcatcgcaacttcgacgtcgcgcgcgtcgtactgccgcgcgtgttgtctattcatcaggtgaaacagttggcccgcgctacgccggtgccgctggaagtcttcgccttcggcagcctgtgcatcatggcggaaggccgctgctatctctcttcctacctgaccggcgaatcgcccaacaccgtcggcgcctgttcgcctgcccgcttcgtacgctggcagcaaacgccgcaggggctggaatcgcgtctcaatgaagtgctgattgaccgttatcaggatggcgaaaatgccggttatccgacgctgtgcaaaggccgctacctggttgatggcgagcgctatcacgcgctggaggagcccaccagcctcaacaccctggaactgttgccggaattgatggccgccaatatcgcctcggtgaaaatcgaaggccgtcagcgcagcccggcttacgtgacccaggtggcgaaagtctggcgccaggcgatcgatcgctgccaagccgatccgcagaatttcgtaccgcagtccgcctggatggagaccctgggcgccatgtccgaggggacacaaactacccttggcgcttatcaccgtaaatggcagtgagaaacatgaaatattcattagggccggtgctgtactactggccaaaagagacgctggaagatttttaccagcaggcggcaaactgcagcgccgacaccatttatctcggcgaagcggtatgcagcaaacgccgcgccaccaaagttggcgactggatcgaaatggcgaaaacgctggccgctagcggcaagcagattgtgctctccaccctcgcgctggtgcaggcctcttctgaactgggcgagctgaagcgctatgtcgataacggcgaatttctgattgaggccagcgatttgggcgtggtaaatctctgcgccgaacgcaagctaccgttcgtcgccgggcatgcgctgaactgctacaacgccgtcaccctgcgcctgctgcggaaacagggcatggtgcgctggtgcatgccggtggaactctcccgtgactggctggctaatttactgacccagtgcgaagagctgggtatccgcaaccagtttgaagtcgaagtgctgagctacggccatctgccgctggcttattccgcgcgctgctttaccgcccgctcggaagaccggccaaaggacgagtgcgaaacctgctgcatcaagtaccctaccgggcgcagcatgctgtcgcaggagaaccagcaggtgttcgtgctcaacggtattcagaccatgagcggctacgtctataacctgggcaatgagctgacctccatgcacggcctggtggatatggtgcgcctgtcgccgatgggcaacgagaccttcgccatgctcgaggccttccgcgccaacgaaaacggcgctgcgccgctggatctcaccagcaatagcgattgcaacggctactggaaacgattgccaggactggtgcttcatgcctgataaaccgctcactttgttaacaacagtgctcagattttaatgcattattaaaaatgcagcttttctggctggcgcgtccaggatgcgccaggctggaagaagaccttcaatctgatgacgatgctgtagcaaagtgagcctttatgactgacaaatctgttccattctcggtgctcgatctggcgccgatcccgcaaggatcttctgccaaagaagcctttacccactctctggatctcgcccggctggccgaatcgcgcggctatcatcgctactggctggcggagcaccataatatggtcggcattgccagcgcagcgacctcggtgctgattggctatctcgccgccaacaccaccaccctgcatctcgggtccggcggcgtgatgctgcctaaccactctccactggtgatagctgagcagttcggcaccctgaacaccctttaccccgggcggatcgacctcggccttggccgcgcgccgggcagcgatcagccgaccatgcgcgccctgcgtcgccatatgagcggcgatgtcgataatttcccgcgcgatgtagcggaactggtggactggtttgacgcccgcgatccgaacccgcacgtgcgcccggttcccggctacggggagcgcattccagtatggctgctgggctcaagcctctatagcgcgcaactggcggcgcagctcggcctgccgtttgccttcgcctcgcacttcgcgccggatatgttgttccaggccctacatctgtatcgcagcaatttcaaaccttcggcgcggctggaaaaaccgtacgcgatggtgtgtatcaatatcatcgccgccgacagcaaccgcgatgcggagtttctcttcacctccatgcagcaggcgtttgtgaagctgcgtcgcggcgagaccgggcagttgccgccgccggtggaaaatatgcatcagctgtggtcagcgtccgagcagtatggtgtgcagcaggcactgagcatgtcgctggtcggcgataaaactaaagtccgccatgggctagagtcgattctgcgtgaaaccgaggcggacgaaatcatggtcaatggccagatcttcgaccaccaggcgcgtctgcattctttcgatttagcgatgcaggtgaaagaggagctgttggggtaacacacacgtcagcccggtggacgtcgcgccaccgggcaatagctttactgataaaccggcagcagattgacgctcgacaggatatgtacaaccgcattgccgaggccaaagagcaggatcagcacaatcattggcgttccgccccaaacgcggaactgtgggctgccgaagcgtttgcgtgagacgcgagccagcagcgccggtacaatcgccgcccagatcgtcgccgccaggccagcatagccgatggcgtagaggaaaccatcgggtttgaccagtccgccaatcatcggcgggataaaggtcagcagcgcggttttaaagcgtcccatcgcgctatcgtcaaagccaaacagatccgccaggtagtcgaacagccccagcgtcacgccgaggaatgaactggcgacggcaaagttcgagaataccaccagcagcagatccaggctccgactattcagcacgccgctcaacgcctgcaccagcacatcaatgttgccgcccttctgcgcgatgtcgataaactgcggacgagggatgttacccatcgtcaccagcagccaaacgacatacagacccagcgccagcagcgtaccgtaggttaagcagcggatgatggtgcgcggatcttttccgtagtatttcatcaagctcggcacgttgccgtgatagccaaaggaggccaggcagaacgggagcgtcatcagcaggtatggcgcataggaggcattcttctccgcaacgttaaatagcgtcgtcggctcgacgtgcccgagcaggctaccgaaggtcaggaagaaggtgatcaccttagcgcccagtacgatagccgtcatgcggctcaccgctttggtgctcatccagacgataaacgccaccagcagcgcaaagccgaagcccgccgcgcgcgccggcaccttcagcgacagttcactgaaggtgtggtggaggatcgaaccgctcgccgaaatataggcgtaggtcaggatatagagcacaaaggcgattgatacaccgttcaccaggttccagcccttgccgagcaggtctttggtaatggtgtcgaagctggagccgatgcggtagttaagattggcctcgaggatcatcaaaccggagtgcagcatgcagaaccaggtgaagaccagcgccgccagcgaccagaaaaaccacgcgccggacatcaccaccggcagcgagaacatgcccgcgccgataatcgtgccgccgataatcaccacgccgccaaacagagacggacgggttgccgtagtggttagtgtcgccatttaccgaattctccagtcgaaaatacttcgctcacgttgagcatgacgcactgtaccagtacacgagtacaaagggaataaaaaaagccccaatcatgacgatcggggctgtattatttagtttacgctagcgggcggcgttgattacgcatcgccaccgaagcgacggcgaccggctgagtcatcgcggcgcggcgcggatgcatcgtcacgacgcggcgcacggccttcacgacgttcgccgctgaaacgacgtccttcaccacgaccgccttcacgacgttcgccaccgaagccacggccgccttcacgacgctcgccgccaaagccacggccgccttcgcgacgctcaccgccgccacgacgttcggtgcgcggctgcgcatcgcccagcagctgcatgttcatcggcttgttcaggatacgggtacgagtaaagtgctgcagcacttcgcccggcatccctttcggcagctcaatggtggagtgagaagcgaacagcttgatgttaccgatgtaacggctgctgatatcgccttcattggcgatcgcgccaacgatatgacgcacttcaacgccgtcatcgcgacccacttcaatgcgatacagctccatgtcacccacgtcacgacgctcacgcttcggacgatcttcgcgatcgccgcgcgggccgcgatcattacggtcgccacgacggtcgaaacgatcgtcacgatcgcggaattcacgacgtggacgcatcggcgcgtccggcggaacgatcagcgaacgttcgccctgagccatcttcagcagcgcagcagccagcgtttccacgtccagctcttcaccttccgccgtcggctggattttcgccagcagtgcacggtactgatccagatcgctgctttccagctgctgctgaactttcgcggcgaatttttccagacgacgcttgctcagcagctccgcgttaggcagttccacttcaggaatggtcagcttcatagtgcgttcgatgttgcgcagcagacgacgctcgcggttctcaacgaacagcagcgcgcggccagcacgaccggcacgaccagtacggccgatacggtgaacgtaggattcagaatccattgggatgtcgtagttcaccaccaggctgatacgctcaacgtccaggccacgggccgcaacgtcagtcgcaatcaggatatccagacgaccatctttcaggcgttccagagtctgctcacgcagcgcctggttcatgtcgccgttcagcgccgcgctgttgtagccattacgctccagcgcttcagctacttccagggtcgcgtttttggtacggacgaagataatcgccgcatcaaagtcttccgcttccaggaaacgcaccagcgcttcgtttttacgcatgccgtaggcagtccagtagctctggctgatatccgggcgagtcgtcacgctggactgaatgcgcacttcctgcggctctttcataaagcgacgggtaatgcgacggatagcttccggcatggtggcggagaacagcgcggtctgatgcccttccgggatctgcgccataatggtttctacatcttcgataaagcccatgcgcagcatttcatctgcttcatccagtaccaggccgctcagtttggagaggtccagggtgccgcgcttcaggtggtccagcagacgacccggggtaccgacgacgatctgcggaccctgacgcagggcgcgcagctgcacgtcataacgctggccgccgtacagggcaaccacgttcacgccgcgcatatgtttagagaattccgtcattgcttcagcaacctgtaccgccagctcgcgggtcggcgccagcaccagaatctgcggtgctctcagctcaggatcgatgttgttcagcagcggtaaagagaatgctgcggttttaccgctaccggtctgggccatacccagaacgtcgcggccgtccagcagatgcggaatgcactcagcctggatcggagatggtttttcgtaacccagatcggtgagcgcttcaaggataggagccttaaggcccagatctgcaaaagtggtttcgaattcagccatgtagtacgtgtgcctcaaaattaatggcggccagtctacataactcatcgtgaaaatttacggtaattttcattgaaatgtgtgaaccggctcaaagtaggtgtattaacgaacaacaacgccctcacccgcgaaggtgatggcaagcaaaaaactatgggctgatgtgttcgtcagctattgctggtccgattctgccaggtcatcttgctcctggcccaagagcgataattccaacaatgcgtatcggtgctcaacgtagttatgtacgttgttggcgaccgccagtttgaacagtgccgtagcgctgtccttgtcccccagacttaggtagtacttacctaaatagaagttggtttcactgagatgctcagcgagcgaggtgttatccgttgcgtctgccttcagacgagtcatcagctctttttcgctaatgtcgccaaggtagaactcgacaatgttccatccccattgctctttatccgacttgtttaagcgctctctgagtgcttcaagcgcccgcttctcgtcgagtttacgctcggcgatataaagccacaggctacggaaaggatcattgggatcgtcttgataaaacgccagcagatcatcttgcgctaacttagcccggccgccgtaatacagggcgataccgcggttcaagtgcgcgtagttgtaagttggatcaagctcaagtacagaatcaaacgcttcataggcagcatcaaaattgcctgcctgcgttaagtaaatgcctaagtaattgaatacttccggcatatcgggtcggattgccagcgcttgtgaaaaatcatttcgcgctagtgccctcagaccgagactatcatacaacactccgcgctcatataaaagctgtgcgcgttcgtcatcggataaagcccgactggcaagaatttgttccatgcgtgccagaatcacttcttgctgtaaagtcggttgcaatggtactgcgaggacggcgtccttacgccaggcggtgctactgcatcctgccagcgtgagagctgtcgccacgaaacaccagcgcaaaaaaggcttcatttcccactcccgaagacaacgattggatgaacgtcctgttccccggctgcaaacgaggcgtcctgcccgtaaaacgccctccgcaaaaacggagggctaacggcaaccttactcgccctgctcggcagccggagcttccggcgctgcggcagacggagtctgttcagttgcttctttaatgctcagacggacacggccctggcggtcaacttccagaaccttaaccggtacttcctgacccatctgcaggtagtcagtcactttctcaacgcgcttgtcagcgatctgcgagatgtgaaccagaccttctttaccgccgccgatggcaacgaatgcgccaaagtcaacgatacgggtcactttaccattgtagatgcggccaacttcgatctcagcggtgatctcttcgatacgacggatagcatgctgcgctttgtcgccgtcggtcgctgcgatcttcacggtaccgtcatcttcgatctcgatggtagtaccggtctcttcggtcagggcacggataacagaaccgcctttaccgataacgtctttgatcttgtccgggttgatcttgatggtgtggatacgcggtgcgaattcagagatatcgccgcgcggcgcgttaatcgcctgctccatcacgcccaggatgtgcagacgcgcacctttagcctggttcaatgcaacctgcatgatttctttggtgataccttcaattttgatatccatctgcagcgcagagataccgtcgcgggaacccgcaactttgaagtccatatcgccgaggtggtcttcgtcaccgaggatgtcagacagcacgacgaagttgtcgccttctttcaccagacccattgcgatacccgccacagcggcttttaccggcacgcccgcgtccatcagcgccagagaggcgccgcagacggaagccatggaagaggaaccgttagattcggtgatttccgataccacgcgcacggtgtacgggaattcttcaatagtcggcatcacggccagtacgccgcgcttcgccagacgaccgtgaccgatttcacgacgcttcggagaccccaccatgccagtttcgcctacggagtacggagggaagttgtagtggaacaggaaggagtcggtgcgctcgcccatcagttcgtcgatgttctgcgcatcgcgtgcggtacccagagtcgcggtaaccagcgcctgcgtttcgccacgggtgaacagcgcggaaccgtgagtacgcggcagaacgccggtacgaacgtccagaccacggatcatatctttttcacggccatcgatacgcggctcgccggccagtacgcggctacgaaccacgtttttctcgatggcgtgcaggatttcacccagctcgttagcgtccagggtttcatcttcagcaaccagcgtggcgatggtttcagatttgatcacgtcaacctgagcgtaacgctcttgtttgtcggtgatacggtaagcatcgctcagacgggattcagccagcgcagccacgcgcgcgttcagcgcttcgttgaccgcttccggctgccagtcccaacgcggtttaccggcttctttcaccaggtcgttgatgttctgaataacaatctgctgctgctcgtggccgaagaccaccgcgcccagcatctggtcttcgctcagcagttccgcttcggattccaccatcagcacggccgcttcggtaccggcaaccaccaggtccagtttgctggacttcagttcttcctgggttgggttcagtacgtactggtcgttgatgtaacccacgcgcgcagcgccgattgggccattgaacggaataccagacagcgacagcgcagcggaagcaccgatcatcgcgacgatgtctgggttaacctgcgggttaacggaaacgacggtggcgataacctgaacttcgttaacgaagccttccgggaacagcgggcgaaccgggcggtcaatcagacgcgcgatcagggtttcgccttcgcttggacggccttcacgacggaagaaaccacccgggattttaccggcagcgtaggtacgctcctggtagttaacggtcagcgggaaaaagtcctggcctggcttcgcttttttctgacccacaacggtaacgaataccgcagtgtcatccatgctaaccatcacagcggccgttgcctggcgcgccatcatgccggtttccagggtcacggtatgctggccgtactggaatttacgaacgatcggattaagcaaaattctatcctttttatctataaatcacgccatatccacgacatagcgtctattgacccgatcttctgcatcctcgcgactaatgacaacctttacccgcccctgcggatgaagcctctcattagccgcgcgaacctctgcatgaagatcattactagcaacaatacatgagttttgaatgaattgctgccgcccggtcgaaaaaaggggccgtcaggcccctttttctgaaactcgcagaattagcgacgcagacccagacgctcaatcagcgcagagtaacgggcaacatctttacgtttcaggtagtcgagcagtttacgacgctgagaaaccatgcgcagcagaccacgacggctgtggtgatcttttttgtgctctgcaaagtggccctgcaggtggttgatctgtgcggtcagcagtgcaacctgaacttcggtagaaccgctgtcgttttcgccacgaccaaactcagaaacgatttttgctttagcttcaacgcttagagacattttataactccaaaaattaaaagaaagaaagggtgccgatctctaattcagcgacccctgatgcaacgcccgaaaatgttaaaacacgttagcggacgttaagcggcgatattctactcgtagcaggcttttatcgcaagaaaagcgcttacgccgggtattccaccaccagacgacgcggggccacgcggccttcatcgtcaatttcgcccatgccgagaaacttgccggactcgctctccatcacccgcaccagcccgttaagcggcgcgcctgactgacgtaccgggttgccgttcttaaagtagactgcggaggtttctggaatattaaccagcgggtaatccgaggccgggctgtccatcggcatcagcagcggatcaagcaactgagcggcaggaatatcctgcgccgccgcctcatcgaccagcgcctgcagctgctcgagggtcaccatccgctcgaccgggtatttgcttaccgccaggcgacgcaggaaaatcacgtgcgcgccgcagccgagcttctcacctaaatcatcgataatcgtccggatgtaggtgcctttcgagcagtggatctccagctccagctcatcgccttcgcggcgaataaacagcagctcatagacggttatcggccgggcttcccgcggaacttcaataccctggcgagcatattcgtatagcttcttgccctgatatttcagcgccgaatacatcgacggcacctgctgcgtctcgccgcggaagctgtccagcgccgccgccagctgttcgtcgctaaaagtcagcgggcgctcttccaccacctgaccgtcggcatcggaggtatccgtgcgctggccaagtttggcgatcacgcggtaacgcttatcggagtccagcagatactgggaaaacttggtcgcttcgccaaggcagatcggcagcataccggtcgccagcggatccagcgcgccggtatgcccggcgcggttggcattataaatacgttttactttttgcagcacatcgttactggaggcgccctgaggcttgtccagcaacaatacgccatgcacgtcgcggccgcgacgacgaggacgactcatcagtcctccttgctgtcgtccgggttcacacgacgctcatcgtcgtgtttcaccacgctggtgaccaggttggacatacgcatcccttccaccagtgagttgtcgtagaagaaagtcagttccggtacgatgcgcagacgcatcgctttccccagcagagagcggataaagccagaagcttcctgcagcgctttgatgcccgctttcaccgcggcttcatctttgtcgttaaggaaggtgacatacaccttggcataggccaggtcacgggacatttccacaccggaaacggtggtcatcatgcccagacgcggatctttaatttcacgctgcaggatgatggcaatctctttttgcatctcctgggccacacgctgcgggcgaccaaattctttcgccataataagttctccagaataaagacaaaaaaggggccaaaagcccctttttaaaatgattgccgggtggcgcttcgcttccccggctgcttagccatcaaatgattaatcgatgctacgctggatttcgatgatttcgaacacttcgatcatatcgccaacgcgaacgtcgttgtagttcttcacaccgataccacattccatgccgttacggacttcgttaacgtcatctttgaagcggcgcagggattccagctcgccttcatagataaccacgttgtcacgcagaacgcggattgggttgtgacgtttgatcgtcccttcggtaaccatacagcccgcgatggcgccgaatttcggcgatttgaagacatcacgcacttcagccagaccgatgatctgctgtttcagttccggagacagcatgccgctcatcgccgctttcacttcgtcgatcaggttatagatgacggagtagtaacgcagatccaggctttccgcttcgataactttacgcgcagaggcatcggcacgaacgttgaagccaaccagaatcgcgttggatgctgctgccagggtagcgtcggtttcggtgataccacctacgccggaaccgatgatcttcactttcacttcgtcggtagacagtttcagtaaggaatcggaaatcgcttcgacagaaccctgtacgtccgctttcagtacgatgttcacttcgtgaacttcgccttcggtcatgttagcgaacatgttttccagtttagatttctgctgacgcgccagcttaacttcacggaatttgccctgacgatacagcgccacttcacgcgcttttttctcgtcacgcactacggtcacttcatcaccggcagccggcacaccggacaggccgaggatttccaccggaatggacggacccgcttccagcacttcgcgacccagttcgtcacgcatcgcgcgcacacggccatattcgaagccgcacagaacaatgtcgcccttgtgcagagtaccttcgcgaaccagaacggtagctaccggaccacgacctttatcaaggaaggattcgatgaccgcgccgctcgccataccgttgcggaccgctttcagctcaagaacttcagcctgcagcaggatcgcgtccagcaggtcgtcgatgccggtacccgctttcgcggaaacgtggacgaactggctctcgccgccccactcttccggcaggatgccgtactgggacagttcgttcttcacgcgatccggatcggcttctggcttatcgatcttgttcaccgccactaccaccggtacctgcgccgctttagcgtgctggatagcttcgatagtctgcggcatcacgccgtcgtctgccgccaccaccagaaccacgatatccgtcgcctgcgcgccacgagcacgcatggaggtaaacgcggcgtggcccggggtatccaggaaggtgatcatgccgttgtcggtttcgacgtggtaagcaccgatgtgctgggtaataccacccgcttcgccggaggcaaccttggtagaacgaatgtagtccagcagcgaggttttaccgtggtcaacgtgacccataatggtcacgaccggtgcgcgcggttcagccgccgcgccggtgtcacggtcgctcattacggcttcttccagttcgttttcacgacgcaggataactttgtggcccatctcttcggcaaccagctgtgcggtttcctggtcgatgacctggttgatggtcgccatggcgcccagcttcatcatcgctttgatgacctgagaacctttcaccgccatcttgttagccagttcgccaacggtgatggtttcgccgattacgacgtcacggttaacggcctgcgctggcttctggaagccctgctgcagagcggaacctttacggtgcttaccgcctttaccgccgcgaacggccgcgcgggcttcttcacgatcagctttcgattcagcgtgtttgttgcctttcttcgccggacgagccgctttgctgctacggctacggccgcgaccgccttcgacttcacgatcgttatcatcttcagcctgacgagcatgctgtgatgtggtgacgtgatagtcgctgctatcttccgggctgtctgaggtttcagaccaatttttttcgttttcttcagccatacggcgtgcttcttccgctacacggcgcgcttcttcttcaagtttgcggcgtgcttcttcttccgatttgcgcttcaattccgcggcttcgttctcgcgacggatcttttcagcctgggcggttttggtcatttcgtcggtatgttgattgctcactttgtctttttccgcagcttcacgtttcgctttatcagcgacttcacgtttagcttgttctgcggcctcacgttcagcttttaattgcgcctcgcgtttcgctgcttcttcagcttcacgacgggcctgctcttccgcttcacgctgcgcctgctcttccgcggccaggcgttcagcctcttgcggatcgcgtttcacaaaggtgcgtttcttgcggacttcgatttgtaccgatttactctttccaccggtacctggaatattcaacgtactgcgcgtcttacgctgtaacgtcagcttgtctggcgccgagccgtgttcacggttcaggtgcgtcaacaaagtttgtttctcttgcgaggtcacagaatcatcagccgatttgcggatgcctgcgtcagcaaattgctgtatcaggcgatccacagaggtctgaatctctgaggccagcgctttaatagtcacatctgtcatgctgttccttcctgctacagtttattacgcttcgtcgccgaaccaacaaatgttgcgagcggccatgatgagctcgccagctttctcgtcggtcatcccttcgatatcagccaggtcatcaacgccctgctcggcgagatcttccagcgtacaaacaccacgggcagccagtttgaatgccagggcacgatccagaccttcgagattcaacagatcatcggcaggtttgttatctcccaggctttcttcctgagccagcgccagcgtagtcagtgcgtttttcgcacgctcacgaagtgcttcaacggtggcttcatccagaccgtcgatttccagcagttctttcatcggcacataggccagctcttccagcgaggagaagccttcttcaaccagcactgtcgcgaaatcttcatcaatatcaagatatttggtgaaggtatcgatagcggcatgcgcttccgcctggtgcttagcctgcagatcgtcaacggtcatgacgttgagttcccagccgctgagctgtgaagccaggcggacgttctgaccgttacggccgatcgcctgcgccaggttgcccgcttctaccgcgatatccatggtgtgtttatcttcatccaccacgatggacgcgacgtctgccggcgccatagcgttaatcacgaactgcgccgggttatcatcccacaggacgatatcgatgcgttcaccacccagctcagtcgacacggcctgcacacgcgcaccgcgcataccgacgcaagcgccaaccgggtcgatgcgcttgtcgttggttttcaccgcgattttggcacgagagcccggatcgcgagccgccgctttgatctccagcacttcttcaccgatttccggcacttcgatgcggaacagttcgatcagcatctcaggtttggaacgggtgacgaacagctgggcgccacgcgcttccggacggacagcgtacagtacgccgcgaatgcggtcgcccggacggaagttttcacgcggcagcatatcttcacgcaggatcacggcttcagcgttgttacccagatccagtgtgatattgtcgcggttcacttttttcaccacgccggtgatgatctcaccttcgtgctcgcggaactgatcgaccaccatcgcgcgctcggcttcgcggactttctgcacgataacctgcttagcggtctgggtggtgatacggtcgaaggtaacagattcgatctgatcttcgacatagtcgccgacgttcatgctttcatcttcgaaacgcgctgcttccagcgtgatctcgcgcgtcggctgggtgacttcttctacaaccagccaacgacggaaggtatcgaaatcgccgctcttgcggtcgatttcaacgcgaacgtcgatctcttgttcgtattttttcttggtggccgttgccagcgcgctttccagcgcttcgaaaattttctcacgcggcagcgctttttcgttggaaacggcttcaacaacagccaaaatttctttgttcatcggggcctttcacctcaatccagactgttaaaagtggggaaccaggttcgccttctggatgttactcagcgcgaacacttcatctttgccttcgacggttaccgtgatcatctcaccgtctaccgctttgataatgccctgccatttgcggcggttctgaaccgccatgcgcagcaccagcgcaacttcttcgccggtgaaacgttgatagtgttcggcggtgaacatcggacggtcaagaccaggcgaagagacttccaggttgtaagcgacagtgatcgggtcttcgacatccatgacggcgcttacctggtggctcacatcagcacaatcatcaacgttgatgccatcttcactatcaatatagatgcgcagtgtggatgtgcgaccgcgaataaattcgatgccgaccagctcaaagccaagcgcttcaaccggcgcagtgagcatctctgtcaatttttgctctaatgtggacaaacccacccccaagacataaaaaaagggcgtatagcccagttattctgaagtcagataacaaaaaaccccgataaatcggggctttagataactgaaccctgagatcgccatggcgatctggaacaccttccgcaagaattctttcaaattcggctacgaaggacacctagtcctcacagtatatttgaaaaagtacttaatgggaaagtggttgcgggggccggatttgaaccgacgaccttcgggttatgagcccgacgagctaccaggctgctccaccccgcgcctgaaacgtggcatattttactctttatgagcaaaagacgcaaatactgctgggatttggtaccgaagacgggacataaaatcgagatgaattgtaacggcgattagtatattttgtcaacatgctttttagcgtccccgattgccgtttgtgctggtatttcaggcttttttagcaaaaagatgatgaagcacttcctgtcgccagtaaaagatggttaaatgaatactcacaattaatgcataaaaatgcagttaaggttgttgggtcgaactcaccacagtctatcgagcagggttttattttatgacgacgattctcaagcatctcccggttggtcaacgtattggtatcgctttctctggtggactggataccagcgccgcgctgttatggatgcgcaaaaaaggcgccgtgccttatgcatataccgctaacctgggtcaaccggacgaagacgactacgatgctatcccgcgccgcgcgaaagagtacggcgctgaaggcgcccgtctgatcgactgccgcaaacagctggtcgcagaagggatcgccgcgattcagtgtggcgctttccataacaccaccggtgggttgacctacttcaacaccacgccgctaggccgcgcggtcaccggcaccatgctggtggcggcgatgaaagaagacggcgttaacatttggggcgatggcagcacctataaaggcaacgatatcgaacgtttctatcgttacggcctgctgaccaacgctgaactgcagatttacaaaccgtggctggacagcgactttatcaatgagctcggcggtcgtcacgaaatgtccgaatttatgatcgcctgtggctttgattacaagatgtcggtcgagaaagcctactccaccgactccaatatgctcggcgcgacccatgaagcgaaagatctcgaattcctgaactccagcgtcaagatcgtcaacccgattatgggcgtgaagttctgggacgaaaacgtgaagatccctgcggaagaggtcaccgtacgctttgagcagggccatccggtggcgctgaatggtaaaacctttgccgatgacgtcgagatgatgctggaagccaaccgcatcggcggtcgtcacggcctgggcatgagcgaccagattgaaaaccggattatcgaagcgaaaagccgcggcatttatgaagctccggggatggcgctgctgcatattgcctacgagcgtttgctgaccggtatccataacgaagatacgattgagcaatatcacgcccacggtcgccagttgggccgcctgctgtatcagggccgctggtttgattcccaggcgctgatgctgcgtgattcgctgcagcgctgggtcgccagccagatcaccggcgaagtcaccctcgaactgcgtcgcggtaacgactactcgatcctcaatacggtatcagacaacctgacctataaagcggagcgtctgaccatggaaaaaggcgattccatgtttactgccgaagaccgtatcggccagctgaccatgcgtaatctggacatcaccgatacccgcgagaagctgttcggctatgcccagtctggcctgctgagcgcctcctcggcaaccggtttaccgcaggttgaaaatctggaaaacaaaggcaaataatcgcctgacaatgttgctttccgccggcggatcaccgccggctttttattttgaatgacccaccaacttaaaaaaaatgccatgacgcattttttccttatcgccagaccagcaaaactgttgactataatagcctcaattgattaattcatatctggtgatacacatcatgaatattaaaccgccgatcaggccgcaaaagaccattgaccgactgatcgatgtacttgagccacacgcgacacccgttaacgcgatcgccagaaaaagactgacatgggaatataaaggcaaaacccagctctttatttttaaaaaaggcgagctgtcgattattcgtaattccgacaggctactgatggtgaccgtctatgagccgcatcttttcggcgtggcggaaatgctgcagcccagccgcagccacagcctgcgagccgaggtatcatgcgaactgctacggatcgaccacgacctggcttcggcgctttttcgccagcataacctgtgggaagaggtgaccagcctgttggcttatcatacctcgtatatggtgtatcgtgacgatctggtcctgcagcagcgtacctattcggtcatccgtaaccatctgctggagatgatgctattaagcgaagagacccgacagcgggtatctattcttgagtatattcaggacaggacccttctgtcgcgtagcagtattctcaatgtattgtcagcattaaagaaaggcggttatattacctttgcccgcggcggttatttacaaaatatcgtctcacttcctgaaaaattctgacccgcactcctcctatcatttattgttatttgctgcagcggggaagatgtttaaatttaaaccaataaccgttaccgctaaaagaacaaaaattttatgctaagcgcctgggtttcccggaagacaatctattcctgagttcgccagcagacgaccacaaacggcgttaaccgccgggtctgcaccggctcaggatatgccagcggaaatcggccagacgtgtgcggcggtagcgagagttgccccctcgcctgccgcgaccataacaatgagatgcacgaacccgttaattatgcccgaacgcccatatcgggcttttttttatctgaaggaatttaataatgaagtctattgctgcaaaaatggttgccgtaacgatcgctttgggagccagcagcgctgcctgcgcagccgttaacctgcatggagaagctggcgccgagtttaccaatctgtccgccagctttggcgccggggaaccgggtatgacgttcagttctcagtgggcccatagcgacaacgacggagatagtgtaggactgggaatgggttataactttaaccttggcccttttctgatgaccctgggcggtaaggcggtctatctgaatccaaaagatggtgatgaaggttacgccatcgccgccggtggtggcgctgaactcccccttggtcagtatttcacgcttttcggcgagggctattactcaccggactcaatgtccagcggcgttgaggattatgtggaggccaatgccggggtacgccttaacgtgctcccatctctgaatatcgaagctggctatcgctatattgatatggcagggaaagatggcaatcgcgataacacgctggccgacggcgcttacgccggggttaacttccgcttttaactcttcacagggattgccggtcagcagtccctgtttcattctcagctggtcagcggcacgcttttcagtacgcggttgatctcttgtaggcccgcaacattattctctttgcggtaaacctcattcatggacgccatctgctccaggcgggtcagggcgccatacactttatacgcctcgctgtgtctgtcgaacacatcgcggcgctccacgtcctgcagataatgacttttcaacgaatggttaaggcgactaatcagtgccgtattgtcctggaaatagcgcctcactgcctgggcatgattcgctgtagtcccagactcactgggcgataccggtacggttagcgcattaatcgtctccaccgtttgggagggcgatgttgaactgcacccagctaaaccgagcacgccggcgacgataagcaacccgatcttgttcattgtgtcacttcacctctgttaatttgacgaggcgactttaacgacagtaaaaggaggcaaccagcgaagagatgtttataaataaatgtccagcggggacaaaaacaaaaaaagacgcttttcagcgtcttttttctggaatattggtaccgaggatgggactcgaacccacaagcccgttagggcactaccacctcaaggtagcgtgtctaccaattccaccacctcggtacagaatacttagtgcgggatatcgctggtcggctgagccggcgcagttggctgagtttgctccgttttcggcgcgctcagattatcccactcacttcctttactggtcttgttgctgttgatattacccagcgccagactgatgatgaagaacagcgcagccaggatgccggtcatacgggtcataaagttgccagaaccgctggacccaaacagtgtgccggaagcgcctgcaccgaaggaggctcccatatcagcgcctttaccttgctgcagcataaccagacctacaaggccaatcgctacaataaggaaaacaaccaaaagagcttcgtacataatcaacctgttccttgcggattcgccgcatactaagtgcttcgaccaataaagcgggacgttttaacgtttcccactgaagcgggtgtgaatactaaccaaagcgaatgaccttcgcaagggcaatttcgacacattgtatcaactgcagaaaaaaacagcaaaaagccaattttcgatcataaaaaaggcggcaagcgccgcctttttaaccacttagccggcaaagctaaacgctttttaccgcctcagcgatgcggtgcgcaaactcgtgcacctgatcttcatgctcgccttccaccatcacgcggatcagcggctccgtacccgatttacgcagcaggacacggccgcgttttcctaacgccgcctccacttccgcggtcaccgctttgacgtgctcattctccagcgggttaccgctgccctcggtaaagcggacattcaccagcagctgagggaacattttcatcccgctgcacaggtcatgcaggctcatgtggttgcggaccatcgccgcgaccacctgcaggctggcaacaatgccatcgccggtggtggttttatccagcaggatcacatggccggagttttccgcaccgatgcgccagcctttttcctgaagcatctccagtacatagcggtcaccgaccttcgcgcgggcaaacgggatgcctaactgcttgagcgccagctccagccccatattactcatcagcgtgccgacggcgccgccgcgcagctgcccctgacgcaatccttcccgggctatgatatagaggatctggtcgccatcgactttattgccttcgtggtcaaccataatcacccgatcgccatcgccgtcgtaggcaatacccagatcggctttttccgccagcacgcgcgcctgcagcgcccgcacgtcagtggcgccgacctcttcgttgatgttgagaccgtctggctcgcagcccatcgcgataacctgggctcccagctcgcggaagacattaggggcgatgtgataggtcgcgccgtgcgcgcaatccaccaccactttcagcgttcccaggctcagttcgttgggaaaggtacccttacaaaattcaatgtagcgccccgccgcatcgacgatacggctggctttgcccagctcagccgaatccacgcaggtgagctctttctccatttcggcttcaatcgcctcttcgacatcatccggcagcttggtgccctcaatggagaagaatttaatgccgttgtcgtagaaagggttatgtgaagcagagataacaatccccgcctcggcgcggaaggcgcgcgtcaggtaggcaatggccggtgtcggcataggcccggtgaacgacgcagagagccccgctgctgccagtccagcttccagcgccgattccagcatatagcccgaaatacgggtatccttgccgatgataattttacgcgaaccgtgacgcgctagcactttgcccgccgcccagcccagcttgagcacaaactccggagtgatcggcgcatcgccgacgcggccacgaataccatcggtgccaaaatacttgcggttactcataacgtttttttcccttagcggcgagggtggcttccaccacgcgcagcgcttctaccgtttctttgacatcatggacgcggataatctgcgcgccctgcattgctgcaatgacggcacacgccaggctgccgttcagccgctccgacggcccgacgttcagcaactgacctaccatcgacttacgtgacataccgaccagcagcggcagaccaaagtgatgaaactccccaagcctggccaacagttggtaattgtgggagagatttttaccgaaaccgaatcccgggtcgagcagcaatttttcttttgcgatccctgcctgttcgcagcgcacaatgtgctcattaaaaaaacgctcaacatcggcgaagacgtcctcatacttcggcgcctcctgcatggtttttggttgtccctgcatatgcatcagacacactggcagtccggtttccgcggcggcctgcagcgcgccgggctcggtcagcgaacgaatatcgttgatgatatgcgccccggccctggccgattggcgaataacctccgccttggaggtatccactgagatccatacctcaaagcgctgggcaatggcttcaaccaccggtatcacccgcgcaagctcctcttccacactaacctcagccgcccctggccgcgtcgattcaccgccgatatcaatgatggtcgcgccggcgttgatcatcagattggcatgcttcaccgcctcaatcagcgaattatgggcgccgccatcggagaaggagtcaggcgtcacatttagaatacccatcacgtgggggtgagagagatcgagggttgagccctgggctacaagtttcatcacaaaatccctgagactgaagaggttaaaaaagaaaaaccccggagcggacgcccggggttttaaggttaaacaagcatcaacagcggtagcttacttgtcgcccagctgctctgacatggtgttgcccgggttcggcgtacgcggttcatcaaccggacgcggcgcacgaggcgtgccattgttgtcagagttgttagaagaacctggttcttcccaacccgctggcggacgaacttcgcgacgagccatcaggtcgtcaatctgcggcgcatcgatggtctcatacttcatgagcgcatctttcatcgcgtgcagaatgtccatgttgtcgttcagcagctggcgagcacgaccgtagttacgctcaatcagcgatttcacttcctggtcgatgatacgcgcggtttcatcggacatatgcttcgctttcgcgacgctacggccgaggaagacttcaccctcttcttccgcatacagcagcggaccgagtttgtcggagaagccccactgggtcaccatgttacgcgccaggttcgtcgccactttaatatcgttggacgcaccggtagaaacatgttccggaccgtagataatctcttccgccagacgaccgccgtacagggtggagatctggctttccagtttctgacggctggcgctgattgcatcgccttccggcaggaagaaggtcacacccagcgcacgaccgcgcgggataatcgtcactttgtgcaccggatcgtgctccggcaccaggcgaccaataatcgcgtggcccgcttcatgataagcagtagactctttctgcgcttccgtcatcaccatggagcgacgttccgcacccatcatgattttgtctttcgctttctcgaactcaaccatcgacacaacgcgtttgttgccgcgggcagcaaacagcgccgcttcgttgaccaggttggccagatccgcaccggagaagcccggggtaccgcgcgcaatgattgccgcatcgatatccggcgccagcggaacgcgacgcatatgcactttcaggatctgctcacgaccgcgaacatccggcaggccaaccaccacctggcggtcaaaacggcccggacgcaacagcgcggggtcaagaacgtccggacggttagtcgccgcgataacgatgataccttcgttaccttcgaagccgtccatctcaaccagcatctggttcagggtctgctcacgttcatcgtgaccaccgcccaggcctgcgccacgctggcggccgacggcgtcgatttcatcgatgaagatgatgcaaggcgcggctttcttagcctgttcgaacatgtcacgcacacgagaagcgcccacaccgacgaacatttcgacgaagtcagaaccggaaatggtaaagaacggtaccttcgcttcaccagcgatcgctttcgccagcagcgttttaccggtacccggagggccgaccatcaggacgcctttcgggattttaccgcccagtttctggaagcggctcggctcacgcaggtattctaccagctcgccgacttcctctttcgcttcgtcacacccggcaacgtctgcaaaagtggttttgatctggtcttccgtcaacatacgggctttgcttttgccgaaggacatcgcgcccttcccgccgccgccctgcatttgccgcataaagaagatccagacgccgatcagcagcagcattgggaaccaggagatgaagatggaagccagcaggctcggctcttctggtggttcgccaacaactttgacgtttttagtcaacaggttatcgagcagcttcggatcgttaaccggaatgtaagtcgtgtaacggttactatctttcttggtaacgttgatctcacgtccgttgatacgcgcttcgcgaacctggtcctgattgacctcttgcaggaaggtagaataatccaccttgcggccattcgactcgctgggcccaaagctctggaatactgacatcagcacaacggcaatgaccagccagagtattaggtttttcgccatgtcactcaagggattaacctcttattacaactgtgttaaaaacagcgtcaggatactctatatccagtttctttcaaactttcgtttgaaatctgccggttatggtttacgcccggtcgctacaatatacacttcacgcgaacgagcgcgggaagagtccggcttacgaactttgaccttcgtaaacagggagcgaatttctcgaagatactcatcgaagccttcgccctggaacaccttcactacaaaactaccacctggcgctaatacatcacgagacatttcaagcgccagttctaccagatacatagcccggggaatatccaccgccggtgttccgcacatattcggcgccatatcggacatgacaacttggactttactgtcgcccactcgctcaagtaacgctttcaggactaattcatcacgaaaatcgccctgaaggaagtccacaccaacgattggatccattggtaaaagatcgcaagcgatgatgcggccgctgttgccgatctgcgtgaccgcatactgcgaccagccaccgggagcagcaccgaggtcgactaccgtcatccccggcttaaaaattttgtcactttgctgtatttcatcaagtttaaaccaggcacgggaacgtaacccctttttctgtgcctgttgaacatatttatcgctaaagtgttcctgaagccagcggcttgagctggcagaacgctttttacctgtcatttaacattcccgttcgggttcatcgtactttactgcgtaaaaatcgacgcggtagtttggcgatatatgggagatggcggtagaatgacccgttttcaatcccaacgtaagcaaaaaaatacgatgaatctgagtactaaacaaaaacagcacctgaaaggtctggcacatccgctcaagccggtagttatgcttggcaacaatggtttgaccgaaggggtactggccgagatcgaacaagcgttagggcaccatgaactcatcaaggtgaagatcgcctcagaagatcgcgaaacaaaagccttgatcgtggaagccatcgtacgcgaaaccggcgcctgtaacgtacaggtcatcggtaaaacgctggttctgtaccgcccaacgccagagcgtaaaatctcgctgccacgctaagaatatcctgaatctcgacacaactttgtgtaaaacgagggatttctgcggccaggcgagcaaaatgccatgctcctgacgttgataaaaggccgctatgcggcctttttcctttctttacaatctataaacatcgtagcgggaaatacgccttacaggtattcaaccttggtaatttcgtattccacttccccacccggggtacggatagtcacgacgtcatcctgctctttgccgatcagaccgcgggcgatcggcgagttcacggagatcagattctgcttaaaatcagcttcgtcatcgcccacgatgcggtaggtctgttcctcgtcggtatcgaggttcagcacgctgacggtagaaccaaaaatcacccggccgttgttcggcattttggtgatatcgataacctgcgcgttagacagtttcgcttcgatatccttgatacgcccctcgcagaaaccctgctgctcacgcgcggcgtgatactcggcattctctttcagatcgccgtgttcacgggcctcagcaatagcggcaatgatttcaggacgacgcacagacttcagataatccagttcttcgcgcagtttttcagcgccacgtaaggtcatcggaatcgcttgcattagttatacctctttatcattccttcagggaacggatagctccgctccgccacctgtcctgcccacgggcaggacacgagcaaaaagaaaccgacccgggaaacactccccaggtcagcagcaatttttcatttgatgggtattttaccccgaagttcattatgggtcatcgtttactttactgggcgttgcaccgtagtatgacggcctggcttcaggttgttagcgcgagattatgcgatttcccagatttatcatcggattgaccgccggtatagcgcttagcgctcaggcggcgaatattgacgagtacatcaaccagcttcccgccggtgcgaaccttgcctttatggcgcaaaaggtcggcgcatcgacgccggaaatcgactatcacagccagcaaatggcgctcccggccagtacgcaaaaggtcatcaccgcgctggcggcgctgctgcaactggggcccgattttcgctttaccaccacgctggaaaccaaaggttcccttgacggcggcgtgctgaaaggcgacctgattgcacgcttcggcggcgatccgacgcttaaacggcaggatattcgcaatatggtggcgacgctgaaaaaagccggcgtgcagcgtatcgaaggcaatgtgctcatcgatacgtcggtcttcgccagccatgacaaagcgcccggctggccgtggaacgacctgacgcagtgcttcagcgccccgccggcggcggcgattgtcgaccgtaactgcttctctgtctcgctgtatagcgcgcagaaaccgggcgatgtcgccttcattcgcgttgcatcctattatccggtcaccatgttcagccaggtgcgaacgctggcgcgtggctcatcggaagcgcagtattgcgagctcgacgtggtgccgggcgatctcaatcgctatactctcaccggctgcctgccgcagcgtagcgagccgctgcctctggccttcgccattcaggatggcgccagctacgccggagcgatcctcaaagcggagctggcccaggcggggatcacctacagcggcacgctgctgcgccagacgctggccaatgagcccggcaccgtgctggcaaccagccagtcggctccgctgcacgatctgctgcggatcatgctgaagaagtcagacaacatgattgccgacaccgtctttcgcaccatcggccacgcccggttcggcgtacctggcacctggcgggcgggctccgatgccgtacggcagatcctgcgtcaacaggctggggtcgatctcggcaacactatcatcgccgacggctctggcctgtcgcgccacaacctgatcgccccggcgaccatgatgcaggtgctgcagtatatcgcccagcacgataccgagctcaacttcatctccatgctgccgctggcgggccatgacggatcgctgcagtatcgcgccggtcttcatcaggcgggcgtcgatggtaaagtctcggcgaaaaccgggtcgctccagggggtttataacctcgcaggcttcatcactaccgccagcggacaaaagatggccttcgtgcaatatctctccggatacgccgtggagccagctgatcagcgcaatcgccgcatcccactggtccgctttgaaagccgcttgtataaagatttgtaccagaacaattaaaacaaaagggccgcatcagatgcggccctttttgatccagagaagtcaggattagcgtttgtagatgaattcgacgccttcttcgtcgtcctcatcccagtcgtcatcccagtcttcgtcatcttctgcttcggcttcggcctcttcaagctgctgacggtgatagtcgtcccacataaactcgactttctccggcttctgctcttcttccgcctgcacgatcgggttttcgatgatgaaggtcatcacgtcccagcacagctctttcacgccctgctggctggccgcggagatcaggtagaatttctcttcccaacccagcgcttcggcaatcgctttggctttggcttcggcttcggccttgtccatcaggtcaatcttgttgaaaactaaccagcgtggtttggaggctagcttctcgctgtatttctccagctcgccgatgataatgcgcgcattctcaaccggatcggagccgtcgatcggatcgatatcgatgaggtgcagcagtacgcggcagcgctcgaggtgcttgaggaagcggataccgaggcctgccccttccgctgcgccttcaatcagccccgggatatcggcaactacgaagctcttttcattgtccatacgcaccacgcccaggcttggcaccagggtggtaaacggatagtcagccactttcggcttggcggcggagaccgcacggatgaaggtggatttgccggcgttcggcatgcccagcatcccgacatcggccaacagcatcagctccagctgcaggtcgcgtttatcacccggggtacccatggttttctgacgcggcgtacggttaacggacgatttgaaacgggtgttgcccaaaccgtgccagccgcctttcgccaccatcagacgctgaccgtgtttggtcatatcgcccatggtctcgccggtgccctgatcgataacccgggtgccgaccggcacttttaccgtcacgtctttaccgcgcttaccggtacagtcgcggctttgaccattctgcccacgttcggcgcggaacgatttttcaaaacggtagtcgatcagggtgttcaggttctcgtccgcttccagccagacatcgccgccatcgccgccatcgccgccatccggaccgcctttcggaatatacttttcgcggcggaagcttacgcaaccattgccgccgtcacctgctacgaccaggatcgttgcttcatctacaaacttcattttactctccgtaaatcattcgcctgagcggggcagcggtactaccgcctctcgcttacgccaacgtccccaaagacgatgaccgatggcggaatacatcgcgcccgcaaccacgacaaacgcaccgagataaccaatcaggtttaacatcggtctggcgaaaacatcgggccaggccattgataataaatcagaaaacagtagcgtaaacagtggcgtcaaggtgattaacgcgctgacctgcgccgcctgccagcgcgccatggcttccgccagcgccccgtagccgaccagggtattcagcccgcaaaaaatcaggcatgccagttgccagctgcttaaccgggaaatcactccgggctcagcaagtggcagtaatgcaatcgtacacaaagtgtacagcaaaaatagtatctgctgtgatgccagacggcgcaataacaccttttgcgcgacgccgtagcttacccacaccgtagcggcagcaacgccgaaaattaccccccacgtgtagtccgtcaggcgggtaaagatttcaatcagactggtattgaagaacatcaccagcccgctgagcagcatcaacgcgcccaccacctgggtgccgcgcatgcgctctttcagaattacgacgctagccaccatcatccccaccggcgatagctggccgatgacctgagaagccgtggggctgaggtattgcagggaagaactaaacaggatgaagttaccgaacagaccgccggtggcaatcgctaataacaccagccagcgcggcttgcgaaaaattcgcatcggcggcagtttgcctttgatcgcgaggatcgcgccaagcccaatgctggccatcagaaagcgataaaagaccaccgtaggcggcgccatcacctcgagaacctgtttcattgcaatcggcaacgctccccaacacattgcggtggtaagcgccagaataatgccaatcccagcctgctgcttcatgcctgtttccctgcaaaaattttccggtagacgaatgtaaaaagccccgcaacgtgttgcggggctttcatccgttaccgggacgcgaaaaacttattcagcaacgatgctgatgaatttacggtttttcgggcctttaacttcgaacttgactttaccgtcagtcaaagcgaacagagtgtggtcacggccgcaaccaacgttggtaccagcgtggaatttagtaccacgttgacgaacgatgatgctacctgccagaactgcttcaccgccgaaacgttttacgcccagacgtttagcttctgaatcgcgaccgttacgagtcgagccgccagcctttttatgtgccatttaaatctactcctcaggtcttaggcgctgatgccagtgattttcacatcagtgaaccactgacgatggccctgctgcttacgatagtgtttacgacgacgaaacttaacgattttaactttctcgccacgaccgtgagcaacaacttcagctttgattacgccgccctcaacgaaaggaacgccgatcttgatttcttcaccgtttgcgatcatcagcacttcagcgaattcaacagcttcgccagttgcgatgtccagcttttccaggcgaacggtctgaccttcgcttactcggtgttgtttaccaccactttggaaaaccgcgtacatataaaactccgcttccgcgcacctctttatgtgattcagagtgcgctataaatattcacaatagggcgcgaatattacgcaaaacgcgagcctttgacaagagcgattagcgatcaatgcagaaaaaaaacacaactttcacgacaacgtttatctacggcaatttttcagtacaatcatatcttcttttaattctgtcttaatccttctgtgatcccacctggattcatggtaacaggacatttggcccggcttttgcgatgaatttagaaaaaatcaatgagttaaccgcgcaagatatggcgggtgtcaatgcgacgattcttgagcaactcaactccgatgttcagcttatcaatcagttaggctattacatcgtcagcggcggcggcaaacgcattcgcccgatgattgctgtgctcgccgcacgcgcggtgggctatcaggggagcgcgcatgtcaccattgccgcgctgattgaatttattcataccgccaccctgctgcatgacgacgtcgtcgatgagtctgatatgcgtcgcggcaaagccacggccaatgcggcgtttggcaatgccgccagcgtgctggtcggcgattttatctatacccgcgcctttcagatgatgacccagctgggctcgctgaagatccttgaggtcatgtcggaagcggtgaacgtcattgccgaaggcgaagtgctgcagctgatgaacgtcaatgacccggatatcaccgaagagaactacatgcgcgttatctacagcaagacggcgcgtctgtttgaagctgcctcgcagtgtgcgggactgctggccgactgcactgcggaagaagagcgcgcgttgcaggattatggccgctatctcggcaccgctttccagctaatcgacgatttactcgattatagctctgacggcgagcggctcggtaaaaacgtcggtgacgacctgaacgaaggtaaacccacgctaccgctgctgcacgccatgcaccatggcacacccgatcaatcagcgatgatccgcggtgcgatcgagcaaggcaacggccgccatctactggatgctgtgctggaaacgatggcgacctgcggttcgctggaatggacgcagaagcgtgccgaagaagaagctgacaaagccattgccgcgctgcagatcctcccggacacgccctggcgtgaagccttgattgggctggcgcacattgcagtccagcgcgatcattaatcccccctcctttcccgcgcgacgcgcgggaaagttccagtaaaatgccatttctctccctaaaattccgaatatcttgatagattctgaatattccggcgctttaacagaacttgttagaaccctacatagtacgcgggtatagtgtctctatcgcccatgtgggacgatctggacctttaacaccaggagaatttatggataagttcatcgactggcatcccgcagatattgttgcgggattacgtaaacggggaacatcgctggcggcagagtcgcgacggcacggactaagttcttcaacgctggcgaacgccctgacccgcccctggccgaaaggcgaattgattatcgccacagcgctggaaacgcagccgtgggtcatctggccgtcacgctaccacgacccggtgactcatgagtttatcgacagaacgcagatgatgcgtcagaagaagatcgacaagtgatgtgattgctcgacagcgccccggaacaacgtcccggggcgctgtcaggacgcggttactcgcccttcacgcgttgaatattggcgcccagcgcctgcagtttatcttcgatacgctcatagccgcgatcgatatgatagatgcgatcgacgatggtggtcccttcagcgatacagccggccagcaccaggctcgccgacgcgcgcaaatcggtcgccatcacctgcgcgccagaaagctgcttcacgccgtgacagatagcggtattgctctcgatctccgcgtgcgcgcccatacggatcagctccggaatgtgcatgaagcggttttcaaagatcgtttcggtgatcacgccggtcccttccgctaccaggttaagcagcgtgaactgggcctgcatatcggtcgggaagcccgggtgcggcgcggtacgcacgttgaccgctttcggacggttgccgtgcatatcgaggctgatccagtcttcgcccgtttcgatgtcagccccggcgtcgcgcagcttcgccagtacggcatccagggtatccggctgcgcgttacggcagaggatcttgccgccggaaatcgccgcggccaccaggaaagtcccggtttcaatacggtcaggcagcacacggtagacgccgccgcccaggcgctgcacgccttcgatggtaatgcgatcgctaccctggcctgtgatttttgcgcccagcgcgttcaggaagttggcggtatcgacaatctccggctcgcgagcggcgttttcaataatcgtcgttccctccgcaagcgtcgctgcgctcatgatggttacggtggcgccgacgctcaccttatccatcacaatatgcgcgcctttcaggcgaccgctgaccgaggctttgacataaccttcttccagtttgatctcggcgcccagctgctccagaccgctaatatgcagatcgaccggacgcgcgccgatagcgcagccgccaggcagagaaacttgcccctgaccgaaacgcgccaccaacgggcccagcgcccagatagaggcgcgcatggttttcaccagatcgtacggagcacagaatacatcgaccgggccggcgtcaatccataccgaaccattgcgctcgaccttcgcgcccagctggctcagcagcttcatggtggtatcgatgtctttcagcttaggtacgttttggatctctaccggctcttcggcaagcagcgcggaaaagaggattggcagggcggcgttttttgccccggagatggtgacttcaccctgaaggcgagtcggcccctgaacacggaatttatccattgattctgttctctattaaaaattcacatacgctgcaggggatcccccacagcttagaagccattgagtttgcggtctcgcgcccactcctgcggagtaaaggccttgatcgacagcgcatggatgcggttgtcggcaatatattccatcagcggcgcgtagacgctctgctgctttttcacccgactcatgccatcgaacatctcacccacagcaataacctgaaagtggctgccatcgccagagacgtggacttcctggagggggagtgcgttcatcagcacggtctgaatttcatgattttccatgggctcaaatttatctgatagtgaaaacagcccaacatcttagaggaaagtggcgcggtcttaaacaagcaaaaagccccggcgaaaagattgccagggctttcggaatagcttcagtgctaaggcactgaaaagattatgagatcagatcggcaggcaggttgtaaagaccgatcagcgtttgcaggttttcgctcttgccgaccagctgcgcttcccggccctgacggcgaatcagcgccataaaatgcactaacagcgccaggcccgcggtgtccacgcgcgtggtctgactgagatcgatgatcgccgttcccgccgtcgcctgggcgcgcgcctcccagagcgggaccagcagatcctgatccagctccccgtgcagcgccagcgtctcgccctcgcgagtccagctcagctgcccgctcattattttttctgttccagggtgatcggctgcgcagagatcgctttcagctgcgcggtcaggccatcaacgcccttggtgcgcagcagatcgctccactcattctgtttggtggtgatcatgctcaccccttccgcgatcatatcgtaggcctgccagttgccggtctgggtatttttacgccactggaagtcaagacgtaccggcggacgaccgttcgggtcgatgatagtgacgcggatcggaacgatggttgcgctgcccagcggctgctccggagcaatctggtaagtctgcccatggtacatcgccagcgcctgaccgtaggcctgcttcaggtattcacggaaggcgacaaaataggcctcacgctgcgcaggggtcgcttctttgtaatagcggcccagcaccagcgcgccggcatatttcacctgtacatacggcaataactcctggtcgacgatgtcgcgcagatagttaggattagctttaatcttcggctgttcattcttcaggcgatcgaaggttttctgcgccgcttcattcatcagcttatacggattggactgatctgcggcctggacggcggtcagcggggcaatcaccagcatggcgaccatgagtaagcgtttaaacatatcgtatttctcctgaaattaatgcgtcgtgccggctgccggcgtcgcgtcagtatgaccttctgcctcggccttatcattgccagaattctgattgtcgccgcccttactgttataaaggaactgaccaatcagatcttccagcaccatggcggacttagtgtcctggatagtgccgccgtctttaaggatagtcgtcccgaggtccgggtcttcaaaaccgacgttcagcgccaggtactgctcgcccagcaggccagaggtgcggatcgccaacgaactggtatccgggatatggttgtagcgctcatcgatatcgagctccacgcgtggcagataggttttcggatcgagcgtaatgtccgctacccgccccactaccacgccgccgatgcgcaccggcgagcgcgccttcaggccgccgatgttatcgaaagtcgcataaaggcgataagtcggctcggtgcgtagcgaggtgacgttcgccgccttcaggcagacaaacagcgccgccagcagcgccaccagtaagaacacccctacccagatttcagtttttttcgtttgcatgaactcaattcccaaacatcagcgcagtcagcacaaaatccagccccagaaccgccagcgacgcatgcaccacggtacgcgttgtcgcccggctaatcccggcggaagtggggatagcgtcataaccattaaataacgcaatccaggttaccgtaatagcgaacaccagactcttaatcaggcagttcaccagatccattcgccagtcgacggcattttgcatcgcggtccagaaaaaaccaccgtcaatgcctttccagctcacacccaccagcgcaccgccccagatccctaccgcgacgaagataatcgtcagcagcggcagcgaaatgacaccggcccagaagcgtggggaaatgacgcgacgcagcggatccaccgccatcatctccatactggagagctgttccgtggcccgcatcaggccaatctcggcggtcagcgccgacccggcgcggccggcaaacagcagcgcggcgaccaccggccccagctcacgcagcagcgacagcgccaccagcatgccaagactggtctctgcgctgtaggtggttaacaccagatacccctgcagcccgagcaccataccgataaacaagcccgatacaatgataatcagcatcgacaggacgccgacgttatagagttgacgaaccagcagcggcgcgtgcttgcgaaactctggtttgccgacaacggcgttgaaaagcattaatccggcgcgtccaaacgtcgcggtggttttaataccgcgatgacctagcgcggccagcgcattaaacagcatgagtcgctcaactccctatgcctaataaatcatggtgatagtcgccagcaggataacggaacggcaccggaccgtcggcaataccatcaatgaactgacgaacccgaggatcggtattctcccgtagcgactgggcgctaccgtgggcgacaatctttttatccgccacgatatacgcgtagtccgcaatactaagcacctcgggcacatcgtgcgaaaccacgatgcaagtgacacccagcgtgctgttgagttcagaaatcagcttcaccagcacgcccatagtgatgggatcctgcccgacgaacggttcgtcgaacataatcagatccggctccagggcaatggctctcgccagggcggcgcggcgcgccatcccaccggaaagctcagaaggcattaacttcgccgcaccgcgtagccccaccgcttccagcttcatcatcaccgtcgtatgcagcagcgcaggcggcaaatgcgtatgttcgcgcagcggataggcaacgttgtcaaagacattgagatcggtgaacagcgcgccggactggaacagcatgctcatccgcttacgcaccgtataaagacgcgaacgcgtcatctgcggcacgttctcgccatcaaacaggatctctcccctgtccggcgggatctggccgccgatcaggcgtaacagggtagtcttgccgatccccgaaggtcccatgatcgcagtaattttaccgcgcggcaccgacagcgagatgtcgtcgaagatcacacgatcgccgcgtgaaaagcggataccgcgcacttcaactaaattcgcctgagtttggctcataaaatcatccttactaaacacctgacgggcaagcatggccctttcttgcgccacaatcacaacatttttacagaatcttacctgcacaggttagcgaaagctggcatttgttttacttttggcacacataaagtcaaaattaagaattcgttacgctgcgtagggataacccagcgaggcgacgattatacctgaagaaaggactttagatgctcttagcgacggctctgttaattattggtttattgctggttgtctacagcgccgatcgtctggtctatgccgcctccatcctgtgtcgtatgttggcgatcccgccgctgatcatcggcatgacagtggtcagtatcggcaccagcctgcctgagatcatggtcgccaccgcggcctcgctgcacgggcagaccgatctggcggtcggcaccgcgctcggatctaatatcaccaatatcttattgatcctcggtctcgccgccttactcaggccatttaccgtgcattctgatattctgcgccgcgaattaccgctaatgttgctggtcagcgtgctggcgggactggtgctctacgatggacaactgacccgtctcgacgggctatttttactggcgttagcgcttctgtggctgctgttcaccatcaaaatcgctcgtctggcggagcgccagggaagcgatagcctgacccgcgaacagctggcggagctgccacgcgaagggtcgctgccggtcgccctgctctggttaggggtagcgatgatcgtcatgccgatggcgacccgcatggtggtggataacagtacagtgctggcaaactatttcgccatcagcgaactgaccgtcggcctgacggtggtggcgataggcaccagcctgccggagctggccaccgccatcgccggggcgcggaaaggggaagatgatattgccatcggcaatatcatcggcgccaatatccttaatatcgcactggtgctgggtttaccggcgctgatcgcgccggggagctttgcgaccgaagccttcactcgcgattatggcgtgatgctgctggtcagcctgatcttcgcagtgctgtgctggcgccgtcagcagcagccgggacgactggttggcgcgctgctggtcggcggctttgtggtttggttggcgatgctgttttggacagcaccgctcttcgttgaatgattcgggataacatcatgtcgcaaatagatttgcccacggattttgactttcaacaggcaggccgtcaggtgctggaaattgaacgtgaaggtctggcccagctcgatcaatacataaatgaagactttacccatgcctgcgaaacgattttccgctgcggcgggaaagtcgtggtgatggggatgggcaaatccggccacatcggccgcaaaatggcggcaaccttcgccagtaccggcacctcggcattttttgtccaccccggcgaagcggcgcacggtgatttaggtatggtcaccccgcaggatgtggtaattgcgttgtcgaactccggcgaatcgaatgaaatcctcgcgctgatcccggtcctcaagcgccagcaggtgaagcttatctgtatcaccagccggccggagagcagcatggcgcgcgcggcggatatccatctgtgcgtgaaagtgccgaaggaggcctgcccgttaggactggcgcccacgtcgagcaccaccgccgcgctggtgatgggtgatgccctcgccgtcgccctgctggaagcccgcggctttaccgctgaggatttcgccctgtcgcatccgggcggcgcactcggccgtaagctgttgctgcgggtcaatgatattatgcataccggtgatgaaatcccgcacgtcggcctgcaggcgaccctgcgcgatgcgctgctggaaatcacgcgtaaaaatttaggcatgaccgctatctgcgatgacgatatgaacatcatcggtatctttaccgacggtgacctgcgccgggtcttcgataccggcgttgatatgcgcgatgccagcattgccgacgtcatgacccggggaggtatccgcatccgccccggcactctggcggtggatgcgctaaacctgatgcaatcccgtcatatcacctgcgtgctggttgccgatggcgaccatctgctgggtgtggtacatatgcacgatctgctgcgcgcgggcgtagtgtaagtaaggaaaaaataatgaataatgctgatgctcagttagcgacctgctacgggccggtaagccaggcgtttgtcgatcgcgcggcgaagatccgtctactgatccttgatgtcgacggtgtattatccgacgggcttatctatatgggtaatcacggcgaggagctgaaagcgtttaacgtccgtgatggctatggtatccgctgcgcgctgacctcgggtattgaagtggcgattattaccgggcgaaaagctaaactggtagaagatcgctgtcagacgctgggcatcacgcatttgtaccaggggcagtcggacaagctgctggcgttccgcgatctgacggacaaactgcacgtgcggccggaagaagtcgcctacatcggcgacgatctgattgactggccggtgatggccgaagtgggccttagcgtcgccgtcgccgatgcgcatccgctgctgctaccgcgggcgaattatgtcacgcgaattaacggcggacgcggcgcggtacgcgaagtctgcgatttgttactattggcgcagggcaagttggatgaggccaaagggcaatcaatatgagtaaaaccagacgttgggttatcattttactgtcgctgctcgcgctgatccttatcggcctgaatctggcgaatacggacgacacggcccagccggaggtcaatcctaacgaccctacgtataaaagcgaacataccgacaccgtggtatacagtccggaaggcgccctgagctatcggctgattgccgagcacgtggaatatttttccgatcaggaggtctcctggtttaccaaaccggtgatgaccacctttgatactaacaaggtgcctacctggtcggtcagagcagacaaagcgaagctgacgaatgaccggatgctctatctttacgggcacgttgaggtgaatgcgctcgcgccagattctcaactgcgcaaaattacgacggataacgcccagataaatctggtaacgcaggacgttacctccgatgacatggtgacgttatacggcaccacatttaattccagcggcctgaaaatgcgtggaaaccttcgcagcaaaaatgccgagctgattgaaaaggtgagaacctcttatgaaattcagaacaaacaaactcagccttaagattgcgctcgccggcgcgttactggccgccagcctgccggccctcgccaagacgggcgataccgatcagccgatccatatcgaatccgatcagcagtcgctggacatgcagggcaatgtcgtcaccttcaccggtaacgtggtcgtgacccaggggacgatcaagattaacgctgataaagtggtggtcacccgtccgggcaacgagaaaggcaaagaggtgatcgaaggtttcggtaacccggctactttctatcagatgcaggataacggcaagccggtaaaaggccgggcgtcgaaaatgcgctacgagctgcagaacgattacgtcgtgctgacgggcaacgcttatctggaacagctcgacagcaacatcaagggcgacaagatcacctatctggtgaaagagcaaaaaatgcaggccttcagcgataaaggtcgacgcgtcaccaccgttctggtgccgtccgagctgcaggataaaagcggcaaccagcaaaagaagagtaactaatccgttatggcaaccttaactgcgaagaatctcgctaaagcgtataaaggccgccgcgtggtggaagatgtcagtctcaccgttaactcgggcgagattgtcggcttgctcggcccgaacggcgccggtaaaacgaccaccttctacatggtggtcgggattgtgccccgcgacgcaggcaatatcatcatcgatgacgaagacatcagcctgctgccgctgcacgcgcgcgcgcgacggggcatcggctacctgccgcaggaagcgtcgattttccgtcgcctcagcgtctatgacaacctgatggcggtcctgcagatccgtgacgatctaaccagcgaacaacgggaagatcgcgctaaagagctgatggaagagtttcatattgagcacctgcgcgacagcctcggtcaggcgctctccggtggtgaacgccgccgcgtcgaaatcgcccgcgcgctggcggcgaatccgaaatttattcttctggatgaaccctttgccggcgtggatccgatctccgttatcgatattaaacgcatcattgagcacctgcgcgacagcggtctcggcgttctgattaccgaccataacgtccgtgagaccctcgcggtctgcgaacgcgcgtatattgtcagtcagggacaccttatcgctcatggtacaccgcagcagatcctcgaagatgagcaggttaagcgcgtgtatcttggggaagacttcagactctgatagggtagaggttacagacgttttagccggagatatttaccctgaacatgaagcaaggtttgcaattaaggcttagccaacagcttgccatgacgccgcagctgcagcaggcgattcgtttgctgcagttgtccacgttagaactccagcaagagctccagcaagcgctggaaagtaacccgttgcttgagcaaaccgatcttcacgacgaggtagaggcaaaagaggtggaggaccgcgagtccctcgataccgtcgatgcgcttgagcaaaaagagatgcccgacgaactgcctctcgatgccagctgggatgaaatctataccgctggcacgccgtcgggtaacggcgtcgactatcaggacgacgagcttcccgtctatcaaggcgagaccacccagacgctgcaggactatctgatgtggcaggttgagctgacgcctttcaccgacaccgaccgcgctattgccacctctatcgtcgacgccgtcgacgatacgggctacctcacgattcagattgaagatattgtcgacagcatcggcgatgacgagatcggcctggaggaggtggaagcggtcctcaagcgaatccagcgttttgatccggttggcgtcgcagcgaaagatctgcgcgactgcctgctgatccagctgtcgcaatttgctaaagagacgccgtggctggaagaggcgcggctgattatcagcgaccatcttgatctgctggccaaccatgatttccgcactctaatgcgagtcacccgcctgaaagaagaggtgcttaaagaggcggtcaacctgatccagtccctggatcctcgccctggccagtccattcagaccagcgaaccggaatatgtcatcccggatgtgctggtgcgcaaggtgagcggccgctggaccgtcgagctcaacgccgacagcattccacggttgaaaataaatcagcagtatgcggcaatgggcaacagcgcccgcaatgacgccgacggccagttcattcgcagcaatctgcaggaagcccgctggctgattaaaagtctggaaagccgcaacgataccctgctgcgcgtcagccgctgcatcgtagagcagcagcaggcttttttcgaacagggtgaagagtatatgaagccgatggtgctggccgatatcgcccaggccgtcgagatgcatgaatcgacgatttcccgtgtcaccacgcaaaaatatctgcacagtccgcgcggtatttttgaactgaagtatttcttctccagccatgtgaataccgaaggcggaggcgaagcctcgtcgacggcgattcgcgcgctggtgaagaagcttatcgccgcggaaaaccccgcgaagccgttgagcgacagtaagctcacctccatgctgtccgagcagggtattatggtggcgcgccgcactgtcgcgaagtacagagagtctttatccatcccgccgtcaaaccagcgtaaacaactggtctgacataaccgataaggaagacactatgcagctcaacattacaggacacaacgtcgaaattacgcctgcgatgcgcgaattcgttacggcgaagttcagcaagctggagcaatttttcgaccggatcaatcaggtctatattgtgttaaaagtagagaaagtgacgcaaattgcggacgcgaatctgcatgtcaacggtggcgaaatccatgccagtgcggaagggcaggatatgtatgcggctgtcgatggtcttatcgacaagctggcaagacagttaacgaagcacaaagataaactaaaacaacactaattgtccgggcccccttgcgcccgccgctggatatcatcggcgacgggcgcgggggcgctcaggtgaaattatgatgaacaacgattcggctctacaactgagcaacgtcctgaaccaggaatgtacccgtagccaggtgcactgccagagcaagaagcgtgctctggaaatcatcagcgaactggccgccaaacagttaagtttgccgccgcaggtggtgttcgaagcgatcctcacccgcgaaaaaatgggcagtaccgggatcggcaatggtattgccattccccacggaaaactggaagaggatacgctgcgtgctgtcggcgtttttgtccagctggaaacccccatcgccttcgacgcgatcgacaatcagcctgtcgacctgctgttcgcgctgctggtgccggccgaccagacaaaaactcacctgcatacgctctccctggtggccaaacggctggcggacaaagcgatttgtcgtcgcctgcgcgcggcgcagagcgatgaagagttgtatgagatcatcaccgaagcaggaagcagcgatgacgcataacggcagtcgcaccttatcctttatcgtactgaggagaaacggtacatggtactgatgatcgtcagcggccgctcgggctcggggaaatccgtcgctctgcgagcgctggaagatatgggcttttactgcgtggataacctgccggtcgtgctgctgcccgacctggcgcggtcgctggctgaccgtaatatctccgcggccgtcagcatcgacgtgcgtaacatgccggaatccccggagatcttcgagcaggcgatgcagaatctgccggaatgtttttctccgcagctgctgttccttgatgccgaccgcaataccctgatccgccggtacagcgacacccgtcgtctgcacccgctctccagcaagaatctgtcgctggaaagcgccatcgacgaagagagcgatctgctggagcccctgcgctcccgcgccgatctgatcgtcgatacgtcggaaatgtcggtgcatgagctggcggaaatgctgcgtacccgactgctgggtaaacgcgagcgtgaactgacgatggtcttcgaatccttcggcttcaagcacggtattccgatcgatgccgattacgtctttgacgtgcgctttctgcccaacccgcactgggatccgaaactgcgtccaatgaccggtctggataaaccagtggccgccttcctcgatcggcacactgaagtgcacaactttatttatcagacccgaagctatcttgagctatggttaccgatgctggagaccaacaatcgcagctatctgacggtggccattggctgtaccggcggtaaacatcgttcggtttatattgctgaacaactggctgactacttccgctcgcgcggcaagaacgtgcagtctcgtcatcggacgctggaaaaacgtaaatcatgaccgtaaagcagaccgttgaaatcaccaataagctgggcatgcacgcccgcccggcgatgaagctgttcgaactgatgcagaatttcgatgccgaagtactgctgcgcaacgatgaaggcacggaggcggaagccaacagcgtgattgccctgctgatgctggactcggcgaaagggcgacagatagaggtggaggccagcggtccgcaggaagttgaagccctcgccgcggtgattgccctgtttaacgctggctttgacgaagactaaacgtgacgcttcccggcggcggacgactggcgattgtaccagccccggcgccggagtaacccgctaatagagcttatgctcgcgcatgaacccttccccgcccagctgtcgcatctggcgtaagatccaggcctgacgactgcgcacatagcctgacggcgcatcggcgcgatagcggatcgggttcggcagcaccgcggccagcagagccgcttcccccggcgtcagctgactggcgggtttatgaaaatagcgctgggcggccgcttccacaccaaatatcccatcgccgaactcggcaatattcaggtagacggtcaggatccgctttttactccacacggtttcgatcccgacagtcagcccggcttccagccccttacgcagccagctgcggccatcccataaaaacaggtttttcgccgtctgctgcgacagcgttgacgcgccgcggatgcgggtctcgtgacgttcattgtgcgccagcgctttctcaatcgccgacacgtcgaacccccagtgttccgggaacttctgatcttcggcggcaatcaccgccagccccatccatggggagattttatccatagcgacccagtcggaatgcgccagataatggaaatcgccggacagccaggcgctcacctgccgctcaagcatcaccgccgaaaacggcaccggcagcacgctaaacagcgcgatccccccgccccagaaaacggcggcgatcagcagcagacgcaatgccagacgttttagcagcgcaaagggcgcaatgcggagcctcatgcgctcagcgccagcacgcgggccaccagcttctcaattccggtggcggcttgcgcaatgtcctccgccagcatatacgccggagtggtgaccactttgttgtcttcatccaccacgatgtcgtcgaccgggcaaggcacgtgctctgcccccatctcttccaccacatcggcggtatcaagatcggtcccaatggttatccgcagcggaaacgcaaagatcttcggtagcatcgccggggcaatgcacataaagcccagcggcttgccggtctgatgcatcgccagcgccagggcccgcagatcgggatccacctggcattcgctgccctcggcggcgaagctgcttagatttttcgccgcgccgaatccgccagggacgatcagcgcgtccagcgtctccgcacgcgcctgcaccagcggcaggatgtcgccgcgggcgatacgcgctgcttccaccagcacattgcgctgctctggcatcgcctccccggtcagatggttgatgacatcgcgctgcggtttatcgggcgcaaagcacactgcctgcgcgccgttgcgcgcgatcgccagcagggtaatcaccgcctcatggatttcactgccgtcgtacacgccgcagccgcccagtaccacaccaatttttttcatcgctttcgctcctccatgcaactcgctgaaaccagtcaaaaatgtcgattaactcgctatgcttcacatattttactgattcatgtaacaaattagttaagctttgctatcttaatgagcgagcaatccacttcttcggttgcgccacgtaacaacatcactcaaacaacactggctcaaccaccagttccctggtgttggcgcagtattcgcgcaccccggtctgtccggggtcattttttgctggctttcgccacccacgccttcagtaccgctacatcgttttgccactcggatttcatctcttcaacccattcagcgacattatcagaccaggcaggcagatccggagtctggatctgctggcccagctgctggatgtggcgcagtccgatagaaccggccgcccctttgatcttatgcccctcttcgacaatccctttttggtcgcgggcggtcagattagactccagaacggacatgtagcccggcatcatcttctcaaacaccgcgagaccatcgttgataagcttcggtcccaccagctcgatatattgctccagcatatcggtatccagcaccgcgtcggctttatgcagatcggccgccggcgcttcctgcgcttcctcatccggtgcatcccagaatttcttgatcatggccgttagcgctggcaccgatagcggcttactcaatacatcgtccatcccggcgtcgagatactcttttttattcttcagcacgttggcggtgagggcgaccagcggcggtagctcgtcagcggcaaagcgctgtttcagttcacgggaaatatccagtccggtcatgtccggtaactgaatatccaacagcacaaggtcatattcgcctggctcaaacatctccagcgcggctttcccggtcatcgccacatcaacgctgttacccagtttttccagcactgaacgggccacaataacgttgagctcaatgtcctcaaccagcagcacgttgagcgccggtaatggcatgtcgtcttccgccagcgtatcttccacttcttccgcaatggcaggcgcatggacggtaagcgtaaaggtcgcccctttacccggctggctggtaacgctgatatcaccgcccatattacgcgccaggcgacgcgagacggcgagaccaatcccggttccggtggccggtttgccgccgtggctgtctttgacctggtaatacatggcgaaaattttgtcctgttccgcttcaggaataccaattccggagtcttccacttcgaagtgcaggatatcgccttcgtcatagcgcacgcggacgttcacccctccgccctgcggggtaaacttcacggcgttgctgataagattccacaggatctgccgcaggcgggtcccatccgtgattaccttatgcggcagcggcaggctcggctccagcacaaagcgcagccccttctgctgtgcctgcaggccggataggttttcaaggtcggcaaggaagctggtgaagtccaccggctggttatcgagctgcaccttgcggcgctccattttgtccatgtcgataatatcattgaagatattccccagcgtcaccgccgagacatggatagttttcaggtatttttcctgctcgctggtcagttcggtatccagcaaaattcggctcagcccgacgatcccgtttagcggggtacgcagctcatgactgatggtggaaataaaggtggttttatcccggctggcgcgctcaagagcgtcctgatagcgtttacgttcggtgatatcgcggccgaagcccatcaggccgcgacgcttaccgacgcgatcgtagtaggggaccttgcggatttcaaagcacgctttgcggccatcgggatagtccagccactgctcataggtcagcgatacattatggcggaacaccttctcgtcggtctccagtaccttttccgccgcctcttcgctatagacgtcctgcggtttgaggtggatcagctgtttctcgcttttgccggtcagcagctccatcgcccggttacagcctgaaaactccttatcctcattgcgatagaagaccaggtccggggaagcatcaaggaaagagcgcagaaaggaggattgctgttcgagctggatctgcgtctcttcacgctctttcatctcaatcttcaactgctcgagggtggtctcgcgctcggcttccgctttttcacgttcgccaatctcctgattcaactgcgcgatgttatctttcagttggacgttcagctttagatcgcgctcacgcatctcctccagcttgtccaccagccgcgaaagacgctgacgggactcttcgagctgctccaccaccaccgagagaaagtagaccgcccaaggcgtgatcagcaggccaaagaagatagagcggataacgtcgatactttcaacctggccatgcagcaccatggtaaccgccatctgtaccacgatggccagcaccaccagcgcaagagccaacagcatcgaaaagcggaccagacccagcttcatcatcaggtcgacataatactgcgccagcatacgaatttgcttcataggggattccttcacgacaactccgcacaataatactcaattctgagcaatgcgctgtaagttgtgcaaaaaatgcgggcaggagtcgatacggcggccggccgctgaggcgaaccagccgcaaaagagggggatcaggagagggattaacgcttgcttaacgcctcccagagtcctttcaggtaggtcacgccgagggcgcggtcgaacaagccatagcccggccgtccggtctctccccagataaagcgaccatgatccgggcgaatatagccgtcgaatccgttgtcatacagcgcttgcatcactttgtacatatccagggagccgtactctgacggatgggcgcactcgtaaaagtctttatcctgcatcagctttatattgcggacgtgggcaaaatgaattcgcttacgccgcgtaaattctgccaggatggcgtacacgtcattatcaggatcttcggcaatcgagccggtgcagagcgtaatgccgttggcgggtgaatcgacggcccggcagatccagtccagatcgtcgcggtttttgaccacccgcggcaggccaaaaatggagtacggcgggtcgtccgggtggatcgccattttcaccccaacctcttcgcaaaccgggatcaccgcctgcagaaaataaaccaggttctcccgcagcttctgatcatccaccgcgctatatttggcaaacagggtctgcacctccgccagccgttccggctcccagcccggcaaggcgaagccgtttgaattctcaagcacctccttcaccacgtcttccagccgcttatcgatatctttcttctcaaacgccatcgtcagcgagccatccggcaggacgtagttcatatccgtcttcatccagtcgaaaaccggcatgaagttatagcagatgactttaacgccaaagcgggcaaggttgcggatggtctgctggtagttggcaatatagcgctcacgggtaggtaggccgattttgatgtcgtcatggatgttgacgctctctatcacctccattttcaggcctgcggcatgggcctgaccgaccagacgctcaattttatccaccggccatacttcgcccaccgcgacgtcgtagagcgcgccgaccaccccctcaacgccaggcacctggcgaatatgttctaatgaaatcttgtcttcctctggtccaaaccagcgcattgtcatctgcattgtcttcacctgctcaacttagtttaatttaccctactaccataccagcaatcatagatgattgagcgttggctgtcgtgatagcgatcacattcctgccgaccggctcgccagcggtgaatgcgtcggcgcattcataatttttttcaatttatttcaatagattaatcatgccatggctttttctgccgagcttcctcaaatgtgatccaggcctgattatgatcttttgcatacttgtatggtaataaaagtagcgtaatttgttcagaaaaaagacaatggaaggaatcaaaatgagaagcgtcgtcgtcaaagagccaggccaactgaacattgaatcacgtccggttccagttccgggcgcccatgaagtacgggtgaaaattgcttttgccgggatctgtggttccgatgtacacatctatcacggccacaaccctttcgcgaaatatccccgcgtcatcggccatgaattctatggcatcatcgacgccgtcggcgagcaggtatctccggcacgcatcggcgagcgtgtcgcggtggaccccgttgtcagctgcggccattgttatccttgctcggtaggaaggccgaatgtctgtacgcagctccaggtcataggagttcaccgcgacgggggatttagcgactatgcctgcgtgccggcgaaaaatgcctggcgcatccccgaggctatcagcgaccgtcaggcaacgatggttgagccttttaccatcgcggcaaatattaccgcccagctgcagcccacggcgcaagatattgccctggtttacggcgctggcccgatggggctgacaatcattcaggcgctaaagggggtatatggcgttaagcaggtgatcgtcgtggatcgcattgccgaacgtctgcagatggcccgggaaaacggcgccgatctgacgctcgataacactgaccagccgctcgcggaacagctggcgcagcggcagcttgcccccacgctggtcattgatgccgcctgccacccggcgatcctgcaggaagccattctcctcgcctcccccgccgcccgcatcggtatactcggtttctccggcgaggcctcaaccctcactcagcaaagcatcaccagtaaagaaatttctattttctcctcccggctgaacagcgggcgttttccgctggtcatcgactggatggagaaaggccttattcgtccggaggcgttaatcacccattgtatgccgctggagcaggtgaaagaggccatggagatttttgctaacgaccgtaagacctgctgcaaagtgctgctgcagctgggttaaaccggcatcgtatagaataacggccgacggatatctgcgtatccgccgcgcctgatataaataatataatgagcatggtgttatcatgggaaaaaatatccgctggattatcgtcctgttattatttttagtatatatgataaattatctggaccgggtggcattatccattacggtcccgatgattgaaaaggaccttgcacttaacgctgaacaattcggcattattttcggcagctttttcttcggctacgcggtatttaattttattggcggtttggccgtggataagtttggcgcaacgctggtaatgggcctggcggtcggtctgtggtcgctgttttgcggcttaaccgcggtagccaccggcttttattccatgctggtgctgcgggtgcttttcgggatggcggaaggcccgatctgcgcatcggcgaacaagatgatcaacggctggtttcctaaaaagcaagcggctaccgccgtcggctttctcagcgcaggctctccgctgggcggcgcggtcgccggccccatcgtcggttacctggccctggcattcggctggcgcccggcttttatgattattttcgctatcggtattgtatggatgatagcgtggtttttcattgccgctaattcgcccgaaaagcacaaaaaagtcagccaggaagaacttaagctgattaataaaatgaaagaagaagaagtcgcgctggaaacaatagaaaatcaaacagctcactcgctgggttattatttgaaacagccaattattctggtaacggcctttgccttcttctgctacaactatattctgtttttctttctcagctggttcccgtcctatctggtacaacagcaccatctggatattaaacagatgagccttaccactatgatcccatggatagtcggctttgtcggtctggcgcttgggggctatatttccgataaaatttttaaactcaccgggcgcctgctgctgtcgcgcaaaattgtgctggtggtatgcctgctgatggccgctatctgcgtgggactggcgggtaccgtcagcagcgtcgtgcctgccgttctgctgatgtcggtctccatctttttcctctatgtaaccggggcgatctactgggcgattatccaggacgtggtgcataaatcccgcgtcggcggcgccagcggctttatccatcttatcggcagcgtctccggcatcgtggggccgattgttaccggctatatcgtgcagtctactggtaaatttgacagcgctttcgtactcgccggcactatcgccgcgcttggcgccctgctggtgctgttcgtgatcaaaactccgcgtgtgacgatgaaagccagccaggcataaatggcaggagcgcgatgtccggcattgttccggacatcgcgctcgtacttctcactcagcctggggagcaacccagctacggcccagcgccgagccctgagcgccctgctgattcagataacgatccagttcaaccatgccggtccagcgattttcacaccacagcggcgccaacagcgtgggccgacgggcgctggcggaaatacggtggtagatcacctccggcggcgtatggcggatcatctctccagcggtgacggtatacgcctccagctcaatgccatcgagacgcccggcctgccacgctttggccataatgctgcctttcacaatatgcagtggatgcaatttgatcccatccacgccggtcgccactacctgctccagcgtctgcagacaatgcccctggctctctccgggcagaccgacgatcagatgcgtacagactttcagcccccgctctcgcgccaggcgcgcggtacgctgataacaggcgaaatcgtgtccacggttaatgcgatgcagggtcttatcatgagcagtttgcagccccagctccagccatacctcatacccttgctgatggtattcactcagcaggtcaaggaccgcctgcggaacgcagtccgggcgggtgccgacgcacaggccaacgatatttgcggcactgacggcctgacgatacattgaacggagcacctgcacttcagcgaaggtgctggtgtaggcctgaaaataggccagatagcgcttcgcccggttgacgagctgcgcctgatgagcgagctgttcggcgatagagcgatgctgctgcgcctcatcggcaaacgatgccacgttacagaaagtgcaaccgccgcggcccagcgtgccgtcgcggtttgggcagctaaaaccgccgtgcagcgttagcttatggaccttttcgccatagcgacgcataagatccccaccaaacatattgactaatttctgtaactgcataatctgatagaccgccctcaacaaagggggccaagcctgccacttttcgtcaccgacggcgatgacctggatcaatcgtcagcgcggcgaccaaccctattgcataagcaatcaagattactgcaatttcattcaaccaccaggtgatgagttttccttatattttatcttcgcattgccctaatctgctttctggtaaaaaacggtattaatgtccagtagttaaaaatattgcagtcaaatatgctaataatgaaatatatttcagcgcatattggtaatgcaaagccgcgtgcacagtgagacagatcacactagccgcaccaccagcaggcgtattcaaagcataaaaattgccattattttctttaataacaattagttaacttgtgtatagcacatttttgtattaataagattgccatttgacgtaagtgtggattcccgataagttgggaatccgctggaagctttctggatgagcactctgctcatcatatttatgcagtaattgagattccctcttaacagcaagtcctcaaacttgtgtaccgatgcgaaaaggatttaaagagggcgaatgcgaggtgtaaaccccgtcgccatgctctttctgtgcctgtgcgcaatcggtatcggagggtgtccgtagagcctggggaggttcactgatatgttgtacgacaaatcccttgagagggataactgtggtttcggcctgatcgcccacatagaaggcgaacctagccacaaggtagtgcgaaccgcaatacacgcactggcccgcatgcagcaccgtggcgcaatccttgccgatggtaaaaccggcgacggttgcggtctgctgctgcaaaaacccgatcgtttcttccgcatcgttgccgaagagcgcggctggcgtttagccaaaaactacgccgttgggatgctgttcctgaataaagatcctgagctggctaaagcggcgcgccgcatcgttgaagaagaacttcagcttgagaccctgtcgattgtcggctggcgcgatgtgccgaccaacgaaggcgtgctcggtgaaatcgccctctcctcgctgccccgtattgagcaaatctttgtcaacgccccggctggctggcgcccgcgcgatatggagcgccgtctgtttattgcgcgtcgtcgcattgaaaaacgcctgcaggaagacaaggatttctacgtttgtagcttgtccaatctggtcaacatctataaaggtctgtgtatgccggcggatttgccgcgcttctacctggacctcgcggacctgcgcctggagtcggctatctgcctgttccaccagcgcttctccaccaacaccgtaccacgctggccgttggcgcagccgttccgctacctggcgcacaacggtgaaattaacaccattaccggcaaccgccagtgggcccgcgcccgtacctataagttccagaccccgctgatccctgacctgcacgacgccgcgccgttcgttaacgaaaccggctccgactccagttccatggacaacatgctggagctgctgctggccggcgggatggacatcgtgcgcgccatgcgtctgctggtgccgccagcctggcagaacaacccggatatggatccggagctgcgttcgttcttcgactttaactccatgcatatggagccgtgggacggcccggcgggcatcgtcatgtccgatggccgctacgcggcctgtaacctcgaccgtaacggtctgcgcccggcgcgctacgtcattaccaaagataagctcatcacctgcgcctccgaagtcggcatctgggattaccagcctgacgaagtggtcgagaaaggccgcgtgggcccgggcgagctgatggttatcgatacccgtgccggacgcattctgcactcagcggaaaccgatgacgatctgaagagccgccacccgtataaagagtggatggagaaaaacgttcgtcgcctggtgccgttcgaagatctgccggacgaagaggttggcagccgccagctggatgacgacacgctcgccagctaccagaaacagtttaactacagcgcggaagagctggactccgtcctgcgcgtgctcggcgaaaatggccaggaagcagtcggttcgatgggcgatgacacgcctttcgccgtgctctccagccagccgcgcattatctacgattacttccgtcagcagttcgcccaggtgactaacccgccgatcgacccgctgcgcgaagcgcacgtcatgtcgctggctaccagcatcggtcgcgaaatgaacgtcttctgcgaagcggaaggccaggcgcatcgtctgagcttcaaatcgccgatcctgctgtactccgattttaaacagctgacgacgatggaagaagagcactatcgcgccgacgtcctcgatatcacgttcaacccggcagaggcctccctcagcgagacggtgaaagcgctgtgcgataaagcggagcaaatggtgcgcgacggcaccgtgctgctggtgctctctgaccgcaacatcgccaaagaccgtctgccggtaccggcgccgatggccgttggcgcgatccagacccgtctggtcgataaaagcctgcgctgcgatgccaacatcatcgttgaaaccgccagcgcccgcgatccgcaccacttcgccgtgctgctcggctttggggcgacggctatctatccatacctcgcctacgaaacgctggcgaagctggtcgacagcaaagccatcgataaaccgtaccgtgcggtgatgctgaactatcgcaacggtatcaataaaggtctgtataagatcatgtccaagatggggatctcgaccatcgcctcctatcgctgctcgaagctgttcgaagcggtcggtctgcatcgcgatgtctccgatctctgcttccagggcgtggtcagccgcatcggcggcgccagcttcgacgacttccagcaggatctgctgaatctgtcgaaacgcgcctggctggcgcgtaagccgctggcccagggcggtttgctgaaatatgtgcacggcggcgaatatcatgcctacaacccggacgtggtgcgcaccctgcagcaggccgtgcagagcggcgaatacagcgattatcaacaatacgcgaaattggttaacgaacgtccagcggccacgctgcgcgacctgctggcgctcaacccaggcgaagacgccatcagcatcgacgaagtagagccggcgaaggagctgtttaaacgcttcgataccgcggcgatgtcgatcggcgccctgagcccggaagcgcacgagtcgctggcggaagcgatgaacagcatcggcggcttctccaactccggtgaaggcggtgaagacccggcgcgctacggcactaataaagtgtcgcgcatcaagcaggtcgcgtccggccgcttcggcgtcacgccagcctacctggtcaatgccgacgtcatccagatcaaagtcgcccagggggcgaaaccgggtgaaggtggccagctgccgggtgataaagtcaccccgtacatcgccaaactgcgctattcggtaccgggcgtcacgctgatttccccgccgccgcaccacgatatctactctatcgaggatctggcgcagctgattttcgacctcaagcaggtcaatccgaaagcgatgatttcggtcaaactggtttctgagccgggcgttggcaccatcgccaccggcgtggccaaagcctatgccgacctgatcaccatcgccggctacgacggcggcaccggggcgagcccgctctcttcggtgaaatatgccggctgtccgtgggagctcggcctagtggaaacccagcaggcgctggtcgctaacggtctgcgtcataagatccgtctgcaggtggatggcggcctgaaaaccggtcttgatatcatcaaagcggcgatcctcggcgcggagagcttcggtttcggtaccggcccgatggtcgcgctgggctgtaaatacctgcgtatttgccacctgaacaactgcgctaccggcgtggcgacccaggatgacaaactgcgtaagaatcactatcacggtctgccgttcaaagtgaccaactactttgaatttatcgcccgtgagacccgcgagctgatggcccagctgggcgtcaagcgtctggtggatctgattggccgcaccgatctgctcaaagagctggatgggttcaccgccaagcagcagaaactggatctgggtaaactgctggagaccgcagagccgcatccgggcaaagcgctgtactgcaccgagaacaacccaccgttcgataacggcgtgctcaacgcccagctgctgcagcaggcgaaaccgtacgtggatgaaaagcagagcaagacgttctggtttgatatccgcaacaccgaccgctccgtgggggcctcgctgtccgggtatatcgcccagacccatggcgaccagggactggcgggcgacccgatcgtcgctcactttagcggcaccgcgggccagagcttcggcgtgtggaacgccggcggcgtggaactgcatctgactggcgacgccaacgactacgtcgggaaaggcatggcgggcggtctgctggccattcgtccgccggtgggctctgcgttccgcagccatgaagccagcattatcggcaacacctgcctgtacggcgcgaccggtggtcgtctgtacgccgcaggccgcgcgggcgagcgtttcgccgtgcgtaactccggcgccatcaccgtggtggaaggcatcggcgacaacggctgcgaatatatgaccggcggcatcgtctgcgtgctcggaaaaaccggcgtcaactttggcgcagggatgaccggcggctttgcctatgtcctggatgaagatggcgacttccgcaaacgcgtgaacccggagctggtggaagtgctggacgttgattctctggccatccatgaagagcacctgcgcggtttaatcaccgagcacgtacagcttaccggttcgcaacgcggcgaagagatcctcgccaactggccggccttctccgcgaagtttgcgctggttaaaccaaagtccagcgatgttaaagcactgttgggtcaccgtagtcgttccgcagctgagctgcgggtgcaggcgcagtaaggggttaagatgagtcagaacgtttatcaatttatcgacctgcagcgcgttgatccgccaaagaaaccgctgaagatccgtaaaattgagtttgtggaaatttacgagccgttttcagaaggccaggccaaggcgcaggcggatcgctgcctctcctgtggcaacccgtactgcgaatggaagtgcccggtgcataactacatcccgaactggctgaagctggccaacgaggggcgtatttttgaagcggccgagctgtcgcatcaaaccaacactctgccggaagtctgcgggcgcgtctgcccgcaggaccgcctgtgtgaaggctcctgtacgctgaacgatgagttcggcgcggtgaccatcggcaacatcgaacgctatatcaacgataaggcattcgagatgggctggcgtccggatctctccgacgtgaagccgaccggtaaaaccgtcgcgatcatcggcgctggcccggcgggcctcgcctgcgccgacgtgctgacccgtaacggcgtcaaggcggtggtatttgaccgccatccggaaatcggcggcctgctgaccttcggtatcccggcgttcaagctggaaaaagaggtgatgacccgccgccgggagatcttcaccggcatgggcattgagttcaaactcaataccgaagtgggccgcgacgtgcagctcgacgacctgctgaaggagtacgatgcggtgttcctcggcgtcgggacctatcagtcgatgcgcggtggactggacaacgaagacgctccgggtgtttacgacgcgctgccgttcctgatcgctaacactaagcagatcatgggctttggtgaaaccgccgatgagccctatgtcagcatggaaggcaaacgcgtggtggtgctcggcggtggcgataccgcgatggactgcgtacgcacctccgtccgtcagaatgcggcgcacgtgatctgcgcctatcgccgtgacgaagagaacatgcccggctcaaaacgcgaagtgaaaaacgcgcgcgaagaaggcgttgagttccagtttaacgtccagccgctgggcgtggaagtgaatgccaatggtaaggtttgcggcgtgaagatggcgcgcaccgaaatgggccagccggatgcgaagggccgccgccgcgcggagatcgtccccggctctgagcacgtggtgccggctgacgccgtagtcatggcgtttggcttccgtccgcacagcatggagtggctggcgaagcacagcgtcgaaatggactcccagggccgtattatcgccccggaaggcagcgaaaacgccttccagaccagcaacccgaaaatcttcgccggtggcgatatcgttcgcggttccgatctggtggtcaccgcgattgccgaaggccgtaaagcggcggacgggatcctcaactaccttgaagtctgattaggtccggagcctcacgcataaaagcccgatggttaacgtcatcgggcttttttattgctcattcgccgggcaaaccgccgctttcagcgccgtattataccagccgcagatatgctccaggcgggtaatcgccgagccgacggtcaccgcccacgcgccgcaacgcatcgcctccgccgcctgggcaggcgtgttatagcgcccttcggcaatcactctgcagcccgcaacgctcaggcattgcaccagcgccagatccggctcatccggcgtctcctctgcggtatagccggagagagtcgtcccgacaatctcagcccccaactgccagcactcgagagcatcgtcgagagatgagcaatcggccatcgccacttttcccagctgatgaatttctgctaatagcgccgacactgacgccggacgctgacgctgggtgccgtcaatagcaataatatccgctccgccctgcgccagcgcgtcgatatcttccagccatggcgtaatacgcaccgggctatcgggcaaatcgcgtttgatcaacccaataacgggcactgtcactaacggacgaacggcctgcaggttggccaggccttcgatgcgcagcgctaccgctcccgcctgctcagccgccagcgccattgctgcgacgatagcgggattatccagcggactgcccggcaccggctggcaggagacaattaatccgccatgatgacggatacgctggtccagttgtgcgagtaaagacatgtctgctccctaaaaactacctgtggcgatgacgataccagccatgggacgcctcgtttgtggcagagttaacaaagcggacagacaaaaaaacaggccccgcagggcctgtcagagaagggatttacttcaccacgcgcagcgccgggcgaccaccgcgcggcggcggcgtgtcgtcaggatcgtcgtcgtgattatccggcttatcgccatcgatcaccgacatcaccgtttcgctttcactctccggcgcgacgtcatcatcgttgaggctgctgacgtcttcgtcataggccgcttccggttcgaacatcgtaccagcgccgttctcacgggcgtagatggcgagtaccgcagccagcgggacagacacgttgcgtggtaccccgccaaagcgcgcgttgaagcgcacttcgtcgttcgccagctcgagattgcctaccgcacgcggggcaatattgagaacgatttgcccatcgcgcgcgtactccatcggcacgagcacgcccggcagcgtcacatccaccaccaggtgcggcgtcagctggttatccagcagccagtcataaaacgcccgtaacagatacgggcgacgcggcgtcagctgtgatacatccattatttagccccgaccgaggcgcatttcacgctcggcttcagttaaagaagcgaggaaggaatcacgctcaaatacgcgagtcatatagcctttgagctctttcgcgccagcgccaaccagctccacaccaagaaccggcagacgccacagcagcggcgccaggtagcagtccaccaggctgaactcatcgctcaggaagtaaggtttctgggtgaagaccggcgcgatggccagcaattcttcacgcagctgcttacgcgcagcatcagcttgcgctgcggtaccgctctggatggtgttcatcagcgaataccagtccttctcgatacgttgcatatacaggcggctttcaccacgcgccaccggataaaccggcattaacggcgggtgcgggaaacgctcatccagatactccataatgatgcgggattcccacagagtgagctcacgatccaccagcgtcggtacgctttgattcgggttgaggtcaatcagatcctgaggcgggttatccttctccacgtgctctatctcaaaactgacacccttctcggccagcacaatgcggacctgatggctatagatgtcagtaggaccagaaaacagcgtcattaccgaacgtttgttggcagcgacagccatgaaaacctccaggtatattcagaattttgtactgctgccggccactcatgaccagccagatgtaaaaaccccattagcgcgatgtcaccttcgttcacgaataaaacaaaaaatgaacaatcaccagcatttgggcagaaaattggatgatagtttaccagattttgaagacgttgtggtgaggggattctggaaatgctgaaaaagtggcgagaaccggcgctatgcttgtggataacagccgttttatccataaaaaaacccgccgaagcgggttttttcgcaaattgttctgcgtgagcaggaaacaattaacgtttggagaactgcggacgacgacgtgctttacgcagaccgactttcttacgttcaacctgacgagcgtcacgagtaacgaagccagctttacgcagttcggaacgcagggactcgtcgtactccatcagagcgcgggtgataccgtgacggatcgcaccagcctgaccagaaataccaccacctttaacagtgatgtacagatccagtttctcaaccatgtcgaccagttccagcggctgacgaactaccatgcgggcagtttcacgaccgaagtactgttccagagaacgctggttgataacgattttaccgttgcccggtttgatgaaaacgcgagctgcggaacttttgcggcgaccagtgccgtagtattgattttcagccattgcctataatcccgattagatgtcaagaacttgcggttgctgtgccgcgtggttgtgctcgttacccgcgtaaactttcagtttacggtacatagcacgacccagcgggccttttggcagcatgcctttaaccgcgatttcaatcacacgctcaggacggcgggcaatcatctcttcaaaggtcgcttctttgataccaccgatgtggccggtgtggtggtagtacattttgtcttcgcgcttgttgccggtaacagcaactttttctgcgttcagaacgatgatgtaatcaccggtatcaacgtgcggagtgtattccgctttgtgcttaccgcgcaggcgacgagccagttcagtagccagacggcccagagttttaccggtcgcgtcaacaacataccagtcgcgttttacggtttctggtttagctgtaaaagttttcattaaaagcttacccaaataataagttacacgttggtgaacacccaaacgtttagtcagttgaggttcacacgacattgtccagcaaacctaccccttcgaatagcctatgccggcgcatagaaagtttcgggaaaaaaaccttctcgtaacgtggggtcgcaagattatagagaagtcggggtcaaagatcgacccctttatgagatttttcaggccgcgcccggggcggccttacggccctgaatccgcctgaaaaagtcacctgtcagggcatatgcggacgtttgaggtactcttcgctctgcatctcctgcagacgcgagagacagcgctggaactcaaacttcagccgctcgccctggtaaatgtcgtacagcggtactgccgcgctgaccaccagctttacatggcgctcgtagaactcatccaccagagcgataaagcggcgggcctcgctctccagctgcgcggtcatcaccggcacgtcgaacagcatcaccgtatggaacagtcgggagagcgcgatatagtcatgctggctgcgcgcatccacgcatagcgtggcgaatgacgccgccagcgtctggttttctacgccgagggtaggcagctcgcgatggttaatctccagcgtcggcccggcagcgcgcggcgcgcccgccagcgcgagccacaatttatccatctgttcgcgggtgtcgttattcagcggcgacagccacaggtgcgcctgcgtcagggtacgcagtcgataatcgatgccggcatcgacgttcataatatcgcaatgctgcttgatggcgtcgatcgccggcagaaaacgggcccgctgcaggccattgcgatagagttcatccggcggaatattggaggtcgccaccagggtgatgccgcgggcgaacagggctttcatcagcccgcccaacagcatggcgtcggtaatatcggagacaaaaaactcgtcgaaacagagcacgtcggtttccgctttaaagcggtcggcgacgatctccagcgggtcgctatgtccctgcagggtggtcagctcttcgtgtacgcgcagcatgaaacgatggaaatgcaggcgctgtttacgctcgcccggcaggctctggtaaaacaggtccatcagccaggttttgcctcgccccacgccgccccacatatacaggccgcggacaggtgccgtcccggcagccggctcgcgcttacccagcagtttgccgaatttcgcgcgcaaaccgccgcctgacgcgaccggcgcgggctgcgtctgcagttcctggtaaatggtatcaaggcggctcaccgcttcttgctggacgtcgtcgggttgatggctgccctctttcagggctaaaaggtaacgcgatgttggagacaggctttgcatgatctaattgttattccttgaaaaccgtaatgccgaagctcacgattgacgaaaaaaaggccgttctacactacgcgatgatacgccaggattccacttctgtggaattagcggttatagtggcactatcgggcgcaggcggagagcctaagagccaccctacggaaccacaatacaacgggagatgttcatgacctgggaatacgcgctaattgggttagtcgtcggtatcatcattggtgccgtcgccatgcgtttcggcaaccgcaaactgcgccaacagcaggcgctgcagtacgaactggaaaagaataaagccgagcttgaagagtaccgtgaagagctggtgagccactttgcgcgtagcgccgaactgctggataacatggcgcacgactatcgtcagctatatcagcatatggcgaaaagctctaacaacctgctgccggactcgatggcagacgccaacccgttccgcaaccgtctggaagagtctgaagccagcaacgatcaggcgccggtccagatgccgcgcgactactccgagggcgcatccggtttactgcgcggaggcgcaaaacgcgattaagcctcgctgcgattaaaatattctccgggcgcgcccgtcgcgcccgctccttcccccacttcccggctacaatttaaaccagtccccacgttgttacctgtgcaaaaattcaataacatcaggttattcaggacatttttccatacacctcaggttacgagagccagcatctaatgaagaaacagactttgctgttgagtgcgttagcgttaagcattgggttatcgttgtcggtcctgcctccggcagcggcatccttaccgactcaggtgcccggccagggcgcgttaccaagcctggcgccgatgctggaaaaggttctgccggcggtggttagcgtacaggtggaaggcactgcctcgccgacgctcaatatgccggaagagctgaaaaaatattttggcgataacgccccgcaggagcaggcgcagccgtttgaagggctcggctccggcgttatcatcgacgcggcgaaaggctatgtgctgaccaataaccacgtcatcaatcaggcgcagaagatcagcgtccagctgaacgatggccgtgagttcgatgccaaactagtcgggagcgatgaacagagcgatattgctctgctgcagctgattaagccagaccacctgacgcaaatcgccattgctgactctgataaacttcgcgtcggcgacttcgccgtcgccgtcggcaacccgttcggccttggccagaccgccacatccggcattatctctgcccttggccgcagcggcttgaaccttgaagggctggagaatttcattcagaccgacgcctcgattaaccgcggcaactccggcggcgcgctgctgaacctcaacggcgagcttatcgggatcaacaccgcgatcctcgcgccgggcggcggcagcatcggcatcggctttgccattccaagcaatatggcgaaaaccctcgccgaccagcttattcagtttggcgaaatcaagcgcggcctgttgggcattaaaggcatggaaatgagcgccgacatcgccaaagcgatgaatctcaacgttcagcgcggcgccttcgtcagtgaagtcctgccaaactccggctccgccaaagcggggattaaatccggggacgtcatcgtgagtctgaacggcaaaccgctgaacagtttcgccgaactgcgttcgcggatcgccaccaccgaaccgggtaccaaggtcaaactgggcctgctgcgcgacggaaagccggtcgatgtcgaagtgaccctggataagagcacctcctcaaccgccagcgcggaactgattatcccggcgctgcagggggcctcgttcagcgacggccagatgaaagatggcaccaaaggagtggtgatcgataatgtggataaaggcagcgccgccgcccaggtcggtctgcataaggatgacattatcattggccttaaccggcagcgtattcactcaattgccgaactgcgcaaagcgctcgaaggcaaaccgccggtcatcgccctgaacgtgatccgcggcaacgaaagcatctatctgctgctgcgctgattgtctctccgggcatcgccgccatgtgcgatgtccggacaactcatgctatgctgcgcctgaccattcattaacgatatctgcatcatgcctggaaagttattacgttcagtactcatcggtttgcttgtcgggggtctgctgctggccctgatgccctcgctgcgccagtggcagttggcgccgactacccagaacgatacggcagacgactccccggcgagctataacgccgcggtgcgccgcgcggcgcccgccgtggtgaacgtctataaccgcgcccttaacagcaccagccataatcagctgacgcttggctcaggggtgattatggatcagcgcggctatatcctgaccaacaagcatgttatcaacgatgccgatcagattatcgtcgccctgcaggacggccgcgtcttcgaagcgctgctggtaggatccgattccctcaccgatctcgccgtgctcaagatcaatgctaccggcgggctgccggtgatcccgatcaatccgaaacgcacgccgcacatcggcgacgtggtgctggcgattggcaacccttataacctggggcagaccatcacccaggggatcatcagcgccacagggcgcattggcctcaatccgaccggccgccagaacttcctgcagactgacgcctcgatcaaccacggtaactccggcggggcgctggtgaactccctcggcgagctgatggggattaacaccctctcctttgacaagagcaatgacggcgaaacgccggaaggcattggctttgcgatcccgttccagttagcgaccaaaattatggataaactgatccgcgatggccgggtgatccgcggctatatcggcattagcggccgggagatcgccccgctgcacgcgcagggcggagggatcgatcagattcaggggatcgtcgttaacgatgtggccccggacggtccagcggcgcaagccgggatccgcgccaacgacgtaatcatctccgtgaatgacaaacccgccgtctcggcgctggagacgatggatcaggtggccgagatccgcccgggatcggaaattccggtggtcatcatgcgtgatgataagaaaatcacgctccatatcgccgtccaggaatacccggccaccaactaaacggctccccgtttggggagccacgttaatcgctaaataccggaccggccgggaatctgaccagaaacccggtcaccgccagcagcgatctcagcgcgggccagactatctgtcgctcgcgaagctcatcatccagcgtcagtagcgcaaattcccccttctcacccagcacgccaccctgccagagcagacgctgcgcctgctgccgcgcccagggcgaatcactcttccaggccagcaaatgcagcagcgcctgctgtagacagacgctgtgagaatggttatcccgccgcagccgccggtagacgggcagggacacgctgcgcacggtataaaatccactgcccgcctcttcatcgccttcagggatagcgcgggcgaactgccccgccacgtcacacagccggttgtgcgtcagtggaagttgccgggcgctgagcgccccggccgccatgcacagcagaccgctgcgctgcagcgagggcgtcgcagagcgcacgaccgccgccggtaaggcgctcaccgcccgtgttgcctcgtcagcgttgtggtcagcgccggcctcataacagctggccagcagcgcttcaccaggcgtggcgttcagcgggggcgaaagcaggttcagcgccggctgcagttgtgcaagttcatcgcctgacgccagcatggcgtcaaccaccgcctcccgtgttgatgtccggttttccggacagcatgctatgccttcattcatcaccgtctccttatgagaaatctccgcggccggcttgccagccgcgggaacaggctggcttacatcgccagcacgtacttgagcatcaccccggcggcgatcgccgagccgatcacccccgccacgttcgggcccatcgcgtgcatcagcaggaagttctgcccgtccgcttccagacccaccttgttcgacacccgcgccgccatcggcaccgccgacacccccgccgagccgatcagcgggttgattttgtgccggctgaacacgttcatcagcttcgccatcagcaccccggcggcggtccccacgcagaaggcgatcacccccagcaccaggatccccagcgtctgcggctgcaggaacttgtccgccaccagcttggcccccaccgacagcccgaggaagatggtgacgatgttgatcagcgcgttctgcaccgtatcgctcagccgctccaccacgccgctctcgcgcatcaggttgccgaagcagaacatccccagcagcggcgcggcgtccggcagcaggagcgccaccagcagcaacagctccgccgggaagaggatcttctcccgcttactcaccgtgcgcagctgcaccatacggatcttccgctccttatccgtggtcagcgccttcatgatcggcggctggatcagcggcaccagcgccatataggagtacgccgccaccgcgatggcccccagcagctccggcgccagcttgcccgacaggtaaatcgccgtcgggccgtcggcgccgccgatgatgccgatggccgccgcctgcggcagggtgaagctgatgatgccgaagtagttcagcgtcagcgccccgagcacggtggcgaagataccgaactgcgccgccgcccccagcagcagggtgcgcgggttggccagcagcgggccgaagtcggtcatcgccccgacgcccatgaaaatcaccagcggcgcgatgcccgagccaatcgccaccttatagaagatggccagcaccccggcggagtagcccatgtccaccgcgaggctctccatctgcccctgcaccgacggcagggccagcgccagtgcctctttgatggcgtggacgtccggcgcgcagtggagcttcgcggcaatcaccgccagctgcgccgggtcgtggtgagccagcaggctctccagggcggtgagcgccagcccggcctccgggatattggagagcaggccgccgaagccaatcggcagcagcagtaacggctcgaacttcttcgcaatcgccagccagagcagcagcaggctgaccagcagcatgatggcctggccggcgccgaggtgcatcagccccatgccctggatcagggcgttcagactttccatttccgctcctcgtccttacgccagagtcatcagggtgtcgccgaccgccaccgcgtcgccggctttcaccgcgataccgcgcacggtcccggcctgcgcggcacggatttcggtttccatcttcatggcttccagaatcagcagcacctcgcctgcggccaccgtctggccttccgcggccagcaccttccagatagtgcccgccagcggggcggtcaccggggtaccggcgccggccggggcggcagcctgaaccggtgcggaagacggggtggccgccgtcagctggctgacgtcgccgccgtcgctgactttgaccacgaaggctttgccttccacttccacggtgtagacgccggaggcggcaggtttttctgcttttgccactggctgcgcggcttccacctgcggcaccggctcaaaggccgccgggttgtggcggttttcgaggaacttcaggccgatttgcgggaacagcgccacggtgagcacgtcgtcgatggcgttttcggcaagcgtgatgcccttctcctgcgcctggcgtctgacgtcggcttccagcgcggccagctccggcttgagtaaatccgccgggcggcaggtgacggcgtcggcgccgtcgagcacccgcgcctgcagggcggcgttcaccggcgccggggtgcgaccgtactcgcctttcaggataccggcggtctccttcgcaatggttttgtagcgctcgccggtcaggacgttgagcaccgcctgggtgccgacaatctgcgaggtcggggtcaccagcgggatgaagccgaggtcctcgcgcacgcgggggatttccgccagcacctcatccagacggtgggcggcgctctgctgcttcagctggccttcaaggttggtgagcatcccgcccggcacctgggcgacgaggatacggctgtcggtgcctttcagctggccttcgaaggcatggtattttttgcgcacctcgcggaagtatgcggcgatgctctccagcctgtggatatccagcccggtgtcatattgcgtgccggcgagggtggccaccagcgcctcggtggccgggtggccataggtggcgctcatggacgaaatcgccgtatccacgccgtcgaccccggcttcaatggccttcagcagcgccatctccgccatgccggtggtggcgtggcagtgcaggtgcagggtgacgtcgtagcgcttcttgatttcactgaccagctcaaaggcggcatgcggcgtcagaatgccggacatgtccttgatggcgacggagtcaacgccggtctccagcagctgttcggtgaggtcgagccaggtctgcagggtgtgggccgggctggtggtgtacgaaagcgtacactgggcgtgggcgccgtgccggcggaccgcctgcagggcggcctgcatgttgcgcgggtcgttcatggcatcgaagacgcggaagacgtccatgccgtttttgacggcgcgctccacgaagcgctccaccacgtcgtcggcgtagtggcggtagccgagcaggttctggccgcggagcagcatctgcagcggggtcttgggcatcgcctttttcagctcgcgcaggcggacccacgggtcctcgccgagaaagcggatgcaggcgtcaaaggtggcgccgccccagcactccagcgagcggtagccgacgtcgtccagctgagcggcaacgggcagcatatcgtcgagacgcagacgggtggcgaacagggactggtgggcgtcgcgcaggacgacatcggtaatggcaacggtcatgaattcctccgtgaattaagggtgaagacggcgatggtggtgaatggcggcgacaatcgccggcttcaggcgggcgaaatcgtcggcgggcgcgacggcggccggcgccggtttgggggcggcgggcggctcgggaaacaggcggttgacggcgagggacattccccggatggcgaaaatgagcagcagcaggaacaccagcacaaagcccatgccgagaaacatcagggtgaagccttcgcctaacaggatggcattgtcagtcataaaatggcctttggggggagcgcaataatggcttacggtagcccacgtcagcagagtggatttccccggaccgcctggtcagaagcctcggtttagcagtcagctgccgctgccattactgcgcgatatattcaatcggggttatttaataaagctcacgtgtttgcagatttcatcggcgacaatttctttgcgctgattaaagatcactttattctgctcaaacaggttattgccgtgagtatcgatcgatacaattaacggcccgaactctttcacccggcaaacccataacgtttctggcatgcctaaatcacgccattgcgcatcttcaatctcttccacacagaccgcggcgactaccgcgcagccggcagggaacacacagtgcaaggctttatgttccatacagccctcttcggttcctttgcccataccacctttgccgacgattaatttcacaccggtcttagcaataaattctttttcaaatttttccatgcgcatactggtggttggcccaacggagaccatttcaaatttatcttccgtacctttaatcgggcgcacaatgggcccggcatgtaatatcgcgccaccagcaacgtttaccggtaattcacgtccgccctcaattaagcgacgatgagccacatcacggcaggtcacaatatggccgttgagataaataatatcgcccgctttaatatccgctaaatcttcatctttaatgggcgtagtgagtatttttttagtcatcagaatgccactcctttgtgagacgtaatggtgtagttcaggtctttatcgaaaacgatatgccctttacggtgcgaccagcagccgacgttgaccgccacgccaatagtggaagggtggcgtgcggtattttcgatattgacgcccatcacggaggtattgccggacattccctgcgggccaaggccaattttgttgatgccgtcttcgagcattttttccagcaatgccgcacgttcgttgtcattgtgcgaaccaatcggacgcatcaacgctttcttcgacagcagcgccgcggtttctacagacgtcgccaccccaacgccaaccagcagcggcgggcaggcattcaggccatagctggtcatcacatccagcacgaagcgagtcaccccttcatagccagcgcccggcatcaataccatcgctttacccggcagcgagcagccgccgccagccatataggtgtagatgctgcactggtcggaattcggaacgatctcccagaataccgtcggcgtccctttgccgacgtttttgccggtgttgtattcatcaaaggtctccacgctgttatgacgcagcggggagtcgatggtagctttgattaccgattcgcgcagcagcgcttccagctcgccgatcagcgggaagttggcgccgcactccactagaaactggatcacgccggtgtcctggcaggaaggacgatccagttctttcgccagacgttggttttcaatcatggtggtaaagatcacatcggccagttgactggtctctttcttatgcagatcttgcagctttgccgtgacgtcatcaggcaatactttgccggtatatcccacgaacctggccataatgtcggtcatgcgggatatctgttcacttttgctcataaaggctccttagtcagaacagcgtccgtaaattacggatgaaaagggaaaaggattggcagcaggatcaggctgacaatggtagaaacgataattagaggaatgccggatttggcgtaatcgacgaacttatagcccccggccgacagcaccatcatgttggcaggcatcccgatcggcgtcgcataggcgcaggagctaccgattaccgtcgccatcagtaccgcacgcggatcggcgcccataccggcggcaatcgacaaactcaccggcaccagcaacgcgacggtggcggtattagacataaagttggtcatcaccacggagagggcaaagaccactaccagcagcataaacggtgaggagttattacccagcaggccgataacctgatcggcaaccagcttacccgcaccggtcatttccagcgctttagccagcgccagggtgcctccgaagataaaaatagtttgcgaatcaatggctttataagcctgtttttccgtcaacacgccggtgatgaccagcaccagggcaccaatgcagccggctacagtcagactaataccggtctgtttttcgaaaatcatgccgaggatcgtggcgatcagcaccaccagggacaggatctgcttccagcgcggaacgtggctgtaatcccgctgttcgccaatgctgcccacctcactactgttcgagttattaggcagaaacttatagccgatggttaggaaatagaggatgccgcagaccagcatcggcaggcccactttcgcatactcaaagaaaccgaagccgctgccgatattctgcaaggccgattgcgcgatcaagttaccgggggcgccaatcagcgacaggttgccgccaagcgcggcagcaaacaccagcggcatcagcagacgcgaacgggtgaatcccgatttggcggctacaccgataacgaccgggatcaaaacggctgccgtaccggtattggagagaaaaccggacattacgccaaccaccaccctaatgatgaagatcagctgcttctccgttttggcgaagtgggtgatcacgccaccgactttgtttgccatcccggtttcaaataacgccccgccaacgatgaacatggcgacaaaaagaatgacgttgctgtcgataaaaccggcaaacgcctgcttgagatccaatacaccggtgagcactaacgccacacaaaccaccatggaagtcactgccagtggcactttctcccagacaaacatgatgatagcgaacaccagcaaacatagggtgatggtaataggttccatacttataatttttcctatcaatgatatatgatattgtatccaatattgacgaaggagaaattattcccatgcaaaaagtaagtcaatgcgtttttgcggaatgatcgcgcaatgagatctgcatcaagatcctgtgcagatcgtcacgaaaagtaactaatagcgcagataaatgtaagaaaagccagcctgtcgctggcggaggagcccttcaggtggtggtatcgggcaggtatcgagtgagcatattttccatcgagcgaataatatgttcatgcattcgctggcgggccagtgcttcgttatgttgctcaagcgcttgtaaaatcgctttatgttcgcgaattgagataacggcatactcttcttcggtgactttatgtcccatcgacaggccgttccacatgttgcagagtagcatcttcattttttcattgcccgccgcgctccagatctccatatggaaagcctggttcaggtcggaatattcagcagaattattgtctgccagcgccttctctgcggcatagtgaacctgggcgatgcgtgaaatatcggtccctggacgagaagctttcgccacggcttcactttccagtacggcgcgaatttcataatgttcgcggatggtctgctcattaatccccagcaccaccgcgcctttattcggccgcacttgaatcagaccgtcggcggctaaaatttgaaacgcttcgcgtaccggcatgctggaaacgccaaccagtcgggcaatcccttcaagggtaatctcctgcccttccactaaatcccgcgacaggatcgctttacgcaacaccgccgccacctgctccttcgcggaaagaagcttaattttccctaatttaggcttctgcactttcccaatccttcatatgttgacgcataatttccgcaagcataaggaaataacgctgcgttgtctgggcaatttttccgccttcgccattgccgatggcgttggccagttcgctcagtatcagagccgattcctggccattctctttcagataaagaatgacataagaaatataaccgtccaaaaattgctgatacgccttcgccaggtagcgattatcaagataggaaatcagcagctgatggaacgccagttcgcgcgtattctctcccggacgcgccagctcctgcgcgcgtgcgcgcagcacttccccctgattcgccggcacaagggcaaagagttcggcggccatcaccgcaataacgcgaaaaatatggctcacatcctccacggccaaggtggagacctgcatatgccggttaggcaagcgcaccagaaacccttcctgctcaagagattgcagcgcttccctaaccggcatacgtgaaagtcccagctgttccgcgatgctctcttgcgtcagctcatccccagccttcatcgcaccggaaaggatctggtagcgaatcatctgcgcgatttggtcccgggtctgctttctttcaatctttttcacgctgtcctcatggctggtggcttaaaacgcggggattttagcagatttgcccggcagcaggcgcattggggcgaaaagtgaggtaataaaaagccggaacagcggttccggctcttctgttagggcgagattacttgttgacgaagtcttcgccgagcgcgatatctttcttcagggtgtccagcatgccctccagcgcctgctgttcaaaggcgctgagtttgccgatagactgtcgctcttccacgccgtttttccccagcagcagcggctgggagaagaaacgcgcatagtggccgtcgccttccacgtaggcgcactccaccacgcctttttccccctgcatggcgcgaaccagagagagaccaaaacgggcagccgcctggcccatcgacaaggtcgccgacccgccgcccgctttcgcttccacgacttcagtaccggcgttctgaatacgtttagtcaggtcggcaatttcctgatcgctaaagctgacgccggggatctgcgacagtaaaggcagaatggtgaccccggagtgaccaccaatgaccgggacttccacctcggttgccgatttacctttcagctccgccacaaaggtattggaacggatgatgtccagcgtggtaacgccgaacagtttgtttttatcgtacacgccggcttttttcagtacttcggcggcgatagccacggtggtattcaccgggttggtgataatgccgatgcaggcctgcgggcaggttttggcaatctgctgcacgaggttcttcacgatacccgcattcacattaaacaggtcggaacgatccatgccgggcttacgcgccacgcccgcggagatcagcactacatccgcgccttccagcgccggagtagcgtcttcaccggaaaatcctttaatttttacatctgtggggatatgacttagatctaccgccacgcccggcgtaaccggagcgatgtcgtacaacgagagctctgaacctgaaggcagttgggtcttaagtagtagggcaagcgcctggccgataccaccggcagcgccaaggactgcaactttcatcctaaactccttattatggttaatttagtctttcgttattccgtcgcctggaccttaattcacaagatgaacaattacaatgattatggctgaagaatgcattattgtgcgtagcaatagaacagcggcgcactttatgcttcctgactgaccatccagcaaagcgaagtaccggatcgactattggttacaatacacccagccagttgcgcaaaacaacaccaactcaataacatttcatttacttttacatggctttaagcgttgtgatgagaacatgttccttatacggtttttttgctaaaatatgcccccttcataacattattgacctatcctttcgcggattatttgcataaaaattcatggttatgcataatgatgttgattttaccaccataatctgggtgacttatgcgaagttcggcaaaacaagaagaactggttaaagcgtttaaagcgctgcttaaagaagaaaaattcagctcgcagggagagatcgtccaggcgctgcaggaagagggcttcgagaatatcaaccaatcgaaggtttcccgcatgctcaccaaatttggcgcggtacgtacccgtaacgccaaaatggaaatggtctattgcttgcctgccgagcttggggtaccgaccacctccagcccgctgaagaatttggtgctggatatcgactataacgatgccgtagtggtgattcataccagccccggcgccgcgcagctgatcgcccgtcttctcgactcgctgggcaaagcggaaggcattcttggcagtatcgccggggatgacaccatctttaccacgcctgcgcgcggttttacggtgaaagatctgcacgacgccattctggttctgtttgagcaggaactctgagtaattcccctctggctaccgtcagagggcgactcccttttctttttcctctccccccttccggcacaacaactatttaacacttagtgtcatttacgccgtctatacgttcttttactaacgcgaaaatcgtaaaacgcacaaaagatcaaattcgtatacctttatgaatttattagaaataaatcttatcgctgtcgctaacgtgtcatttttaattcttatccgttataaaaagcgcaatctattgtaactattaacgcacaaaacaattagcatggtattaatatttttggtgattagtgtatacttggttttgtgatgagggtcacgaaacaaagacccccaacaaaaagattcgacgaggtgaacatcatgaaaatcaaaaccactgtagctgctatcagcatcctgtccgtcgtgtcgtttggcgctttcgccgctgatattatcaacagcgagcaggcccagggccgcgaggccatcggcacggtttccgtcggcgcggtagcatcttccccgatggatatgcatgaaatgctgaacaaaaagcgcaggaagaaggggcttcttcttaccgcattattgaagcccgcactggcgaccactggcatgccactgctgagctgtataaataagttttagacgtcaacgattaacctgacaaaaattctctaccgcggcccggcgacatacatcgccccgccgcggcaaaacaaagactggagtaaagattatgaaacgcgcaatgatcatcgcatcccttggcctggcttcccttctctctttcggtgccagcgcggctgtccagcaagtgaacgcagaacaagcccaaaatctgcaatccatgggcaccatctccgtatcccaggtaggtagtgcgccaatggacatgcgtcaggaactggcggctaaagccgagaaagaaggcgccagcagctaccgtattattgaagcacgtaccggcgatagctggcacgccaccgctgagctgtacaaataaaccctcgtcgtcttatttcgacgacttgcccccgcctgccgggggcttttttatgcttgtcgggcattaaaacgcaactccccctccagctcttcctctgcttcatcaaacaataaaatcaatgcgccaaagcgccggcgctgcttgtcatttaaatggatgaactcaatatccagcggcagcggtagcaggccaccggtcactgcgtcccatagcgaatccaggttgttgaccttatcctgagccagctcgaaggttcgggaaaactcccggtagaaatcctgttgttcggcgatttcgtcaaaatcaaacgtataggtggtcatgacagcccctcccgcttctctttctgtcgccgttaagtatagcgataaaaaaaccgacgcctgggcgtcggtttatgggttagctgctggtcagcacatgctggtacttatgcagcatctcaaccagtcgccgtaccggctcggtaacctgcggcgaggcctcccagactcgcagcttctcctgatagacatcaagctccgccagcaactgggtaaaatagcgccgacgcttatcatcgctgccggcggagatcacatggtccgcggttcgtcgcagctgacgatggaaggcggagagatcgtcattcaccggcacgggcgcatcgcgcaagcgctgatgggcgatgattaacgtcaacgccagacggaaacgggcgacgtcacctgggaatttattgagtaataaaaacagctgctgatagagcgcgggcagatgattttctttgcgacgcgccgagttggtggtcagcgaagagaccgctgcggagacaaactggttcagcagcacccgaccggttctggcccgggagttatccctgacaataagaataaccatcagagcgaggaaacagccgacgatctgccccagcgcgctatcgaggaactggctgaactggaactgcatcggattatccagcaccagaatgttgatggtgctcgccagcgcccccagcgatccgagacgccttttctgcacttcgatcccgataaagaacgccatcgccgccaggctgatgcaaagcaacagcatgctctgctgcgtcgccggcatgatcaccaggaagtacaaggtgcccaacggtaacgccgccagggtgccatagaggaagtctatcgccaccattcggggattcggcaggcgcatcgccagcgcggtaaccacggcgatcattaccatcgcgccgctgcctgaggtccagcccgtccacagccagaatagcgttccgagaatacaggagacagaggtgcgccagaagttcaccatcgcgtgatgacgttcggcggactccactttaaccaccgtttcgccgcgcaacacgccatcctcgatacggctgattttagtattccccaccacgccgcgcttaagcagcaggtaacgcgtggcggcgcccacccagctatatatcgtgaccggggtattatgctcgcctttccaggtcaggaagcggcgcatgcgcttcagctgctggtgaacatcctgcaccgtctcaaccggctcggcgaacagctcgcgatagtcgtccgtgaccatttccgggcgtgagttctgaatcagataggtttcgcaagcctgggtgataagggttagcgaaagggtgttgatcgccttcaggcgctgattcgcctttgcccagcgtgaggattccataatcaggttactacgcataccttccagcgccgtagtgcggcgtaccagcgctccccaggcttgatccacttcctctttttcaccgtgcgcgacgcataactgcatcagcttatactgggcaattagcaggttatcgagctcgaggtcgatctcttttttaatcgaacgcggcgaaaacaggagatcggcgacgatggcgctgacaataccgatgacaatttcgctgcagcgttcgacagcaaactgcggcgccagcatcggattggtatggatggtaataatgataatcagcgcggtgtacccggccagcccccaggcataggagttttcgaccttgaccagcgacgaaacccaggtacaaaaaccggcccacagacagcagaccagcatcatcaacagaggcgcgcggatcatcaggatgatgataaccagcgccgcaatacagccaataaaggtcccggcaatacgcaacataccgcgatagcggatcgcgccggagtacggttcgccgccagcagcaaaggccggcccggcggcgacgatcgctgccgtcagtaccgcccagcgcggcgtttcgagctgaaaatggaaaccgacaaacagcgccagcaccaccgcgcatgcaagcttaatggcaaagcggagatgccggggagcaatggtatatgtccccatagcgattaaccaaattcgcgcaggcgcatagccagtttctggaagaagttggcctggctggtatcacgatcttcttgaccggtgatcactaccgtcgccgtggtgcccgatggccacagattcccctgctggtgatcgaggcgaatacgcaccggcacacgctgcgccagacgcacccactcaaggttggagtcgaccgaggccatccctttcgagtcgctgctgctgctggcgttggtcacccccgcagcgatactgtccaccgtccctttaatggttttgctgctgcccagcggggtaatctccgcacgatagcctggacggacgccctccagtttggtctcttccagataggccatgacgtaaaacgtattctctttcaccagcgccaccgccgtggagccacgggtgataaattccccagtgtagacgttaaggttagtcacccagccatccgcaggggcgcgaatgaccgtccgctccagatctagcctggccaggtcgcgactagccaccgctttcgccagctgatgttcaacggtttgcagtacgttgttcgcctgatcaatctcttcccgcgacatcgcctgtacgccaagcttattacgccgaccggcttcgacgcgtttttcctgagctaacgtctgataataggcgacatcagcttccgcctgcgccagcgctttttggtaacgaggttggtcaataacgaacaatacctggtctttcttaaccagttggttatccttgacgtttacctgagaaatcagcccggagacgtcgggggcaatcgccacaatgtcggcgctaaagcgcgcatcacgcgtccacggcgaggcggtgtaataaacccaggcgcggaaaatcgccacgaaggccagaatgaccagtatcacggtaatggcagtacggaggatatttcttgttagtgttttcacatcaacctcaaacgaacaagcgcgatatcaaataaaaaaggcagcaatagagcgccgtattaaacagtgctgggtgccagacaaaatcgtaaatgccggtcggaaccagcagtcggtgcaccagccaaaagatagccagcgacaaaagcaactcgaagaagatcggcggaaacgataagccgaaaatcacgatgacaggaaacagactcatgatgaccttgaataagaagcgtacaggtagtgagcagatgcgtttattatgtagctaacaatatattaacgtaacgattgccgcattatctacaatgtgtgatctaaatcacttttaagccagagtgaataatggaacgattaaaacgcatgtccgttttcgccaaagtggtcgaattaggttcattcaccgcagcggcccgccagcttcagatgagcgtttcctcgatcagtcagaccgtcgccaaactggaagatgagctgcaggtaaagctgctcaaccgcagcacccgcagccttggcttaactgaagcaggtaaaatctattaccagggctgccgtaggatgctgtttgaagcgcaggatgtccatgagcaattatacgcatttaacaatacccccatcgggacgctgcgcatcggctgctcttcaactatggcacagaatgttctggcgcgcataacggcgaaaatgctcaaagaataccccgggctctctgttaatctggtcaccggcatacctgcgccagacctgatcgccgacggccttgacgtggtgatccgcgtgggcgccctgcaggattccagccttttttcccgccgcctgggctcaatgccgatggtattatgcgccgctaaaagctatctggcgcaggctggcaatccagagaaaccggccgaccttgccggacatgcctggctggaatatagcgtgcggccggacaatgagtttgtcattatcgcgccggaagggatctcgacccgcctgaccccgcaggggcgcttcgtgaccaacgaccctatgacgctggtgcgctggctaaccgccggggtgggtatcgcctatgtaccgttaatgtgggcgatcgaagagatcaaccgcggtgagcttgagatcctgctacccagctatcagtccgatccgcgaccggtctacgccctgtatacggaaaaggataaactgccgctgaaagtgcaggtctgtatcaactatctgacggagtattttgtcgacgtggcgaagatctatcagggcatgcacgggcgcgggatcgcccggtgaagcggttcccggcagcgccgggaaccaggtcaggatcaggcggtgccgccgacggtaaggttatcgaccttcagggtcggctggccgacgcccaccggcacgctctggccctctttgccacagacgccgacgccgttatccagacgcaggtcgttgcccaccatcgaaatctgctgcatggtctcaatgccggagccaatcagcgtggcccctttcaccgccttcgtgaccttccctttttcgatcagataggcctcggaagtggagaagacgaatttaccggaggtgatatccacctgcccgccgccgaagttaggcgcaaagataccgtagtcgaccgattcgataatctcctgtggcgttgactggcccgccagcatataggtgttggtcatacgcggcatcggcagatgggcatacgactcacgtcggccattgccggtcggtgcgacgcccatcaggcgcgcgttgagtttatcctgcatatagcctttcagaatgccgttttcgattagcacgttgtattgccccggcgtcccttcgtcatcaatggccaccgagccacggcgatcggcgatggtgccgtcatccactacggtgcacagctcagaggcgactaattcccccatatggccgctaaagaccgaggtgccacgccggttgaaatcgccttccagcccatggccgaccgcttcatgcagcaggacgccaggccagccggcgccgagcaccaccggcagcatccccgcaggggcggcgaccgccgagaggttgaccagcgccatgcgcaccgcttctttcgcccaggcatcagcccgcacgtcgccctcctgggaggcgaggaaatagtcataaccaaaacgcccgccaccgccgctgctgccgcgctcacgcttgccatcctcttccaccagcacgctgacggaaagacgaaccagcggacgaacgtcggcggccagagtgccatcggtggcggcgaccaggatcagctcatacaccccgctcaggctggctgaaacctcctgcacccgctggtccgccgcccgggcgactttgtctacccggcgcagaatatccagcttctcttcccgggtcatactctgcagcgggtcgatgctggtgtacagggcacgatgctctacggcgccgagggtctgcactttgccattgccggtgtcgcgcacaatggtccgcgccgcctgggcgctctgctccagcgccagtttgctgatctgatcggcgtaggcaaagcccgttttttcgccgctgacggcgcgcacgcctacgccctggtcgatattgtacgacccatctttaatgatgctgtcttccagaacccaggattcgtgatagctcgactgaaaatagagatcgccgtaatcgaggcggcgctcggtcagttgaccaagaatggcaaacaggtcctgatgattcaggccatttgccgacagtaattgttcacttaccaggttcagactcatcgttatgctactcgtttgttgccgcctgacaggcggaaatacagaaggctatctattgagattgcggcaattcccggcaatcgtcaaatcattgctttttattgctgcgcgcctggcgcagcacttcattgatctgcggctggtcaatcgggccggtgatgcggtagcgcagaatcgaaactttattccacagcggacccagcactttgctggcggcaaataccgccgcgccgacgatggggttgacggcaaaggccgccgccacgccgacggtcgcggagatctccggcgccaccaccgcctgcagatccagctggcgacgcaccagatcgaccgaccctttcatagcaatatccgcttcaaggccatctaccagcgtatcatcggtatgcagtacgccatccttaatccatgccgtactgttaatcgaatcgaagtaaaagccttcgctgaaggtatcgctgaaatcgaaacgcagtttacgcagcagggcatccacactcagcagacgcagcagctggccagcgtgcccggtactcaggtcggtaaactgccccttgcccaggtggcttttaatgatgccattgagcgacgcgacatcgggtgaccagggcggcgcgcgccagtgcagatcgtagtcgatatcaaacggcgaatccttcaccggcgtggagacgccaaagaaatccgcaaatgtatccgtcttattgccgtgcagtctgcctttcagcgaggttcgaacccctgaaggggcgttcacccacacgccgttggtcgtcagccggccaaacccggtatccaccaggccgttggagagcgttaaggtatcccctttgatcgccacatccccatcgatgcggccatatttttgtccccacagccagcattccgcgcagcgtagctgcagatcgggccagccatggaaatccagccgcgtcgccgtctggggggccacattctctgttgcgttctggccgctggcgctggccggattgaaatagagataacgcacatttgccagccacggagcattgtcgcgcatcgtcaatgtggcattgatctcacgcccctgcgcctcaacctgcgagccgccggcgaccggctgtgacatcagactgacgttgttccactgttgacccgcgagggccagcgacggcgtacgcagcacaatgcgcggtggaaagagcacgctgctgctcacttcatttgccgcgccgttctcgaagagcgccagccactgcgcgccatccatcggcggcagattgagctcgataccggactgatcgggcagcggagagtaccctttgctgtcagtggtaaggatcgctctatccagcgtcagcttatgattgagcaaccagcggctgttaatatgattcttcgccccgatggagccggtcaggtcgaagctgctcaggccgccggcaacgttaattttgaccggaaggggttcgccggcgggcttactgactggcgaaggtaagcgactgctcacattcttcagatcgccgttgatatcgaccttatagctggcattgccatggtacggcagttcgatggcgaccttgccatcccacgggacgctaccgctcaacgcctcactcacggctttcggcagcagcccggtgcgcgacggctgccagttggcattcatcccgacatccaccagaaacgctttttcaccttcgcgggtggaaaaattgaggttcagcggctgattaaaccaggtcgcgctcaacgtttgactattgagatcgccattcacaaagctgaaattaccgctcaggttctgcagcgtagtatctaacggtttgataaacaggctattattctgcaggcgcacatcgcctttcgcggtggtcatctcgccgtcgagggggatattaagatgtaagcgagcgctcacatccccatccagctgcagggaatccagcgccgccccgagcgactctttcagcggcgtagtattaaagtaaggtccaacctctttgcccgggcctttgatatcggcatcaatcagcagtttttcctgcgcatagtccgggatcgcggcatcgagattgctggcggtcacgttgccaagcatcgctttatccgcccgcatccacaggccgttgttgataaaattgaggtcgatgttcagcccggttaacgccggccagtccggttggaaggcaaaagtggcgttcttcagcggaacataaacctggaactggccttcattatgcggataagggaatagatgcggattgccgccatacaccagcgtcgcatcgctggcttgccccgctttaatcgcgccgctgagatagtccaccagcgctttgcccatcagattttccgggaaataacgccatgcctggccaccgtcattggtgctgatgcccgccagaatgcccagccagggatcgtccccctgcggttgcagatagcggaagccgccgcgggcgcgtacgcctgtcgcctgcacgtctatatcgcggccatcaagcataaaccctttgtcgtttttcacccaactgagcgtggcttcgccagcggctatctccagcggcgcgcggaagacgccggcatacggcatcagcgccttcgccatatgggcgcgtaattccccgtgctcaacgctgccattcagactgccggagaagtgctctgccccaggcaggagtttccactgcttccacgccagatcgctccactgcgcctgaaaacgcgttttctccgtcgcctgcagggggatatcgagagccagcaaattgattttgccgccaggctgcgtggtacgccagagttcgcccagagaaggcgccagcttatcagcaaacggctgtaacccgctcaggccgctgagggccaaattgctggcgcgaatacgtaactcatcgctacgctgacgatcgtcgccaccaacgtcctgcgccgggatccacgccatcgccagggctccgcttggccagggtttatcatcgatagcgatccgcgtatcgggaatataaaaggcccagctttgcttatcatgggagagatgcgccgtcaggttatccaccgacaaatgatggacttcgttatcgccctgccagctggcgcccccttttttcagccatacgtcgccgctggccacatcgcctttttcaatggtcatccagccttcgaggctgaagcgggcgcttttcagggcgatattgtcctgcatccagcgtcccagccacggtttgacgtcgatatcatccgcctgcagccagacccggcctttattcagcaggccatcctcatcgcgaagatccatccgcacctgcatgacgccatgctggccggtgaggctggagaggctgagctgcccctcggcgcgatgacggttcctgccgttaagccatgtcagctgcggaaccgccagctccgcccgctgaccggaaagggtcaggaagctcagatggctgtcgcgcagagtaaagtgatcgaactgacgtaaaaagagatcgctgatgcggtcggttttcaggctttcgccaccgtcattggtctgaataggggtattggtatggacctgcagctgccagaaggtgaggtcgcggaactgccagcgcatatgcagcaggctctgccagacatccagcgccagggttacgcgcttgaccgccattgtgccgccatctttcagcccgacatggatatcgcgggcgtctaacgtcggaccaaaagtctgccagctggcggtgatctgcgaggcgtccaccggcgtaccggtgagggtggagatcttctccagcagctgcggacgccaggcgtcgagctgtggcaacacgagacgcaagccactcaccagcagcgcgacgataacaatcaatgttgccacggtgagcaataaaatcccgggcagtcgcctcacgcctctctccttgtcagccgcacaatgacgcggtgtcttacatcataaccacatcgaactgctcttgattatagagcggctcaatttgtaccttcacctgtttgccgacaaagatttccacttccgccagcgcatgcgactcttcccctttcagggtttccgccaccgcaggggaagcatagaccaggaagcgatcggaatcataagcatgatgtacgcggacgatctcacgcataatctcatagcacaccgtttccaccgactttaccgttccacgtccgtggcaggttgggcactcgttgcacagcacatgctccacgctttcacgggtgcgtttacgggtcatctccaccaggcccagctgggagaagccgttaatgctggtcttcacccgatctttactcagcgcctgctctaaagagtgcaacacccgtcgacggtgatcttcattgttcatgtctatgaaatcaatgatgataatgccgccgagattacgcaaacgtagctggcgggctatcgcctgggtggcttcgatgttggtattgaagatcgtatcgtcaagattgcggtgcccgacaaaggccccggtgttgatatcgatggtggtcatcgcctcggtctggtcgatgatcagatagccccccgatttgagctcgactttacgctccagcgcgcgctgaatttcgttctcaacgtcaaagagatcgaatatcggctgacggccgctgtagtgttccagcttgctggtcatttccgggatatattcggcggtgaattcgagcaacgcctcataggtcaggcgcgagtcgacgcgaatgcgatccagttgcgcatcggcaaaatcacgcagcacgcgctgggccagagccagctcgccatacagctgatagcgggtctggttgcgctttttgcgctccatcaccttggtccatacgcgcttaagataagcggcatcggcggccatctcctgctcgtgaacgccttccgcagcggtgcgaatgataaacccgccctgctcatcgcaatattctgcgacgaccttttttaggcgctcgcgctcggcttcgctttcaatccgctgagagacccccacgtgggaggcgcctggcataaagaccagatagcgggaaggcagggtaatatcggtggtcagacgcgcgcctttggtacccagcggatctttaaccacctggaccatcaggtcctggccctggcgcaccagctccgaaatatcgcgcacggtaaactgcttttgctcctcaccggcgacgcactcggtatgcggcatgatatcggaggcgtgaaggaacgccgccttatccagaccaatatctacaaaagccgcctgcattcccggcagcactcggctaacacgacctttgtagatattgcctactattccgcgtcgcgcttcacgctcaatatggatttcctgcagaataccgccatcaatatacgcaacgcgcgtttcggatggcgttacgttaactaataattcagccgtcatctttatccctttcctttacgcagtgagttaaagttactgagcaactcatacgtttccaccagcggtaagccgactacggcgtgatagctgccattaatcttcctgacgaagcaaccacccaacccttgaataccgtatgcacctgctttatctaaaggctcgccgctggccacataatcggcgatatcctgctcgctgagccgccggaaggtcacttccgtgaccaccagacagtccagcgtttgctgcttatccgccagcgccaccgcggtcatgacctgatgggtgtggccggaaagcaaacgcagcatcgctgcagcgtgttcggcgtcgcgcggtttttccagcacttcgccgttcaaaatgacaatcgtatccgctcccagcaccggcaaatcgcgggtggccatcgccaccccggcctgcgctttttcgcgcgccaggcggacgacatagtgctgggcgctctcctgcggctggcgctgctcctcaataccaggaaccagacgctcgaaagcgagaccaagctgagtcagcagttcctgccgacgcggggaaccagaagcgagatacagagttgtcatatcaaccttattgcactgcaaattgctgacgcactttacgcatcagcaggaagagccatggccagaggataccgtttactacactactccagaatacttccggacggaaagagacgttgatcactaaaaactctgcccagaaaacaatgatatccacggccagggataacagcattaccaccagcgcctgctgccacagcgccaggttacggaacagctgatacttcagcgcgaccagataggcgacgatgcttaaagacagcgcgcgaacgccgagcgttgaaccgctgatgagatcaagaatagcccccatcacgaaacccgtccccacgtttacccggtgcggcaacgcgaggatccagtacagcaggatcaataatacccagttgggccggaaaacgctgatgtccgccggccagggcataatttgcagcaatagcgcgataagaaacgagagccagataacccagcgtccctggctacggtaacttgccactattgcccccctgcaggctgcgacggctgaggcggcgtcaacccggtggcgggcgccggcatctgcggccccatcgcatccggcgcaggcagtacctgcggcatcatctgcatcagacgttcgttagccacccgatgaacctcttccggggtcatcgggttagcgccattacgatcggcgccccacagcagcaacagatagcgcaagcgctgcagcccggccgtcggacgcgcctgaatcacggtataggcgcgctgggtgtccagtttcaccgaggagactaccccgaccggatacccttcagggaaacgaccgccgagaccggaggtcaccagcacgtcgccgacgcgaatatcggtatttgccggcagatgctcaagctggagatcgtccgtgcagccgttaccggcggcaatgacgcgaatgtcgttacgcagaacctggatcggcagcgcatgagtggcatcgcagatcagcagcacccggctggtcattttcgccacggccacgacctgccccacgacgcctttatcgctgataaccggctggccttcatagacgccgttcacgctgcctttgtcaataaccacctgatcgctgtaagggtcgttgaccgttgagatgacctgcgtcaccattttttgctcgtcctggcgcagcggcgagccaagcagttcacgcaggcgcgcgttctcctgcttgtactggcccagcatcagcagatcgctgtttttcagcaacagctcctggcgcagcgcacggttttccagttcgagctggtcgcgggtagctagcgtctgcgatacgctgtcgagcagttcccggggaccattagagacaaagtagaaagggctgacggctgtatccatgtacgttctgatttgactgaacgtacccaggcggctgtcggcgataatcacgccaagcgccaccagcaccgccagaataaggcgaatctgtagcgaggggccacggctaaaaattggcttcataggctatgcgtattctcgtgtcagtaaagaccaggggcagctcgtatgccgccccggaccttcaggctgactactcttcgctaaacaggtcgccgccgtgcatgtcgatcatctccagcgccttgccgccgccacgcgctacgcaggtcagcggatcttcagcaaccacgactggaataccggtttcttccattaacagacggtccaggttgcgcagcagcgcaccaccgccggtgagaaccatcccgcgttcagagatatcagacgccagttccggcgggcactgctcaagggcaaccatgaccgcgctcacgatgccggtcagaggctcctgcagcgcttcaagaatttcgtttgagttcagggtgaagccgcgtggcacgccttccgccaggttacgaccgcgcacttcaatttcgcgcacttcatcgcccgggtaagccgaaccgatttcatgcttgatacgttcagcggtcgcttcaccgatcagggagccgtagttacgacgcacgtaattgataacggcttcgtcgaagcggtcaccgccgatacgtacagaagaggaatagaccacgccgttcagggagataaccgccacctcagtggtaccgccaccgatatccaccaccatggagccggtcgcttcagaaaccggtaagcctgcgccaatcgctgccgccatcggctcttcgatcaggaagacttcacgggcgcctgcgccctgcgcggattcacgaatagcgcgacgttcgacctgggttgcgccaaccggtacacacaccagcacgcgcgggctcgggcgcataaagctgttgctgtgcacttgtttgataaagtgctgcagcatcttttccgtcacgaagaagtcagcgataacgccgtccttcatcgggcgaatcgccgcgatattacccggggtacggccgagcatctgcttcgcttcatgacccacggcggcgacgcttttcggcgatccggcacgatcctgacgaatggccaccacggaaggctcattcaatacgatgccttgtccttttacgtaaataagggtattcgcggtacccaggtcaatggacaggtcattggaaaacatgccacgaaatttttttaacatactaagggataatcctgaaagctggggcggaaaacaaaatccgcttactttaccaaccacacgcagcagcgacaaggcgcaaaaatcacctgctgcggtgaaaattagtgcagttcatttcctttgttacaaattttcccgactccgttcattgctgaaatcttcagcagcgctccacgcctgaatttgtaacctgtcaaaggagggtcactggcatttacattgcgatgatccggcaggtagacaagcacacccccttcacgatggcgcgcgttattctacgtgaaatcacgctaaacggcagatcaaaccgagtatctttgcgaatattttttcacatttgtgtcaagtggctgtgaggcggcaaaaaattccccctgcccgcccgtgacaccgcattgggacagtaccaaccactcgctgcggctgcgtacgcccgtcgcaaaaacttgcataggcatgcctttacaggcttccaccaggctttgcaccagcagttggttctcgctgcgcttttcgatgttgcgcgccagacccggatgcagtttgatcagctccgcatccagctgcttgatccagctggttccaaccagggttaaccccgcctgaaccactgccacccgaacgcccagagcgttaaccaatcgcataaccggctgcagacggccgatatattgacaaacatctgcctctgcaagttcaaaaataatccgctgacgctgcgatttttcacactgcatcaaggcatcgcgcagccagcgctggaaacgcggacggatcagcgactccaccgacagttggagcgccagattctcctcgggccagaagcctaaaaacggcagcaggcgcgttacctgcaggcggtcatactcctccgccaggccaaactgcagcaccatcggcatgtattccgctgcaatcacctcttctttaccgtcgtacatccgcgacatcagttcacgatgatgtacccgcccgtcgcgggtgacagctggtttttggtacaaccgcggcccgccgcggctcagcatctgttcgatcagcgttcgccagcgaacgttgccgcgacctttctccggaagggtgtcatcatagaccgaccagctgttgctgccctgcagcaccgcgttgcgcgtcgccgcttccgcatgttccatcacctgcgccgccgattgcccgctgcggaaagaacagatgccgatatgcatcatatcgtcgcgatcgaggatacgcgttggaggcagcgcatccatcgccttcagcaacaggccggcgatactatccgcctctttcaacgtacggtgcggcagcagcacggcgaagtcgctacggtgatagcgcgccaacagcgcgccggggtaacgcataataaaggtagagagcaggttgataagcgtaaagtaatgttcttcggccgccgcccgtccccagttgtcccgtagcagatcaaactccggcagacggatcatcatcacgatgccgtaggctcccaccttcttctggtcttccagcagcgtggccagctgattgtcaaaaaacaggcggttattcagtccggttttcgaatcctgcgccgcgtaggagcgaataagcgtatccatccggctgcgctgatcgctggcgaactgcagctccgacagcagcatatccagcgcgctactggtgctggccggccattcatagaccgacccgcgcacctgcggcccgcgctcgccgctcaggatacgcgtggaacgcagctccagcagctcctggccggccagctggcggcggatccagcggacggcgaagaaaataatcaccaccatgaagccaatggagatcgacagcggggcagtgatcgacagcgaacggaaatagttcaccatcgggtcaacgtagaccagatgcagcgtaatgccaggatgtttaagcgacggaaccgtgatctcacggaattgctcatggctgccgagcgggcgatagctatcgggtcgggaatggctgtagagcggtttgccgttgagcatgaaatcgatatgcacgatctcgatcggcgtcatcagctcatccaactgcggttcaagcttatcgaaagaggtggtgatgagccggttatccagcatggtcgccaccgcctgaacgcggttttcgaccttgttctcaatgccgttataaaaactcagcgaagcgccaatcagcgtgacaaagatggtcaggctagttagcagcgtaataaaggctgagaacttcgtcgttaatcgcatccctgtgttaactccgcgagtgaatgactacccgatgaaccatcaggctcccgtgccggcgcgcgccttgccgcaagcattaaccttttaaagcgcgacgcatactatcaaagatggcgagtctggcaatggaatgcgtattatcggtaaaagtatgccgatagcgagtatagtttgcagaaaaaatttgccaatcgtcgcccgcctgcggcctgcgccagaagcgctttaattttagacgcaggatggcaaacccgcgccggcgacgcaaattattaccggtttaccgtctggccagcttgccgcccccttttccctgctaaagatgccgggtcatgcgcggcaaaggaaacgtcttgcgccactttccgatgattcctggacgaccgcgcctctgcttcggcggcggctcctcatcctaatgtgcaatttttcgtgacatattcgccattcatcgccgtctccgtcatgcttaggaaaacgcatgacggaggacaccatgaaaagaaaaaaactgacggaagccgacgtcacggccgaatccgtttttatgctcaagcggcgccagatgctgaaaatgctgggcatcagcgcgaccgcgctttcccttcccgccgccgcgcaggccgacctgctggactggtttaaaggccacgaccgcccaccagcgccagcgggcaaggccctggagtttgctaaacccgccgagtggcaggctaatttgacgcttaccccggaagataaggtcgccggttacaataatttttatgaattcggcctcgataaagccgatccggcggcgaacgcgggtagcctgcgcaccgatccctggacgctcaccatcggtggcgaagtggcgaaacctctgacccttgaccatgacgatctgaccaaacgcttcccgctggaagagcgcatttatcgtatgcgctgtgtggaagcctggtcgatggtggtcccctgggtcggcttcccgctgcataaactgctggcgctggtggagcccaccagcagcgcgcgctatgtggccttcaaaaccctctatgctccggatcaaatgcccggccagaaagaccggtttatcggcggggggctcgcttacccttacgtggaggggctacggctggatgaagcgatgcacccgctgacgctactcaccgtcggggtgtatggcaaagcgctgccgccgcaaaacggcgcgccggtccgcctgaccgtgccgtggaagtacggttttaaaggcataaaatccattgttagtatcgagctgacccgcgagcggccgccaaccacctggaacctggcggcgccggacgaatacggcttcttcgccaacgtcaatccgcacgtcgatcacccccgctggtcgcaggctagcgagcggtttatcggcgccggcggcgtgctcgatgtgaagcgtcaaccgacgttgctgtttaatggctatgccgacgaagtggcgtcgctgtatcgcggcatgaatctgcgggagaacttctagtgcgtttcaccgtcaaacagatcgtctggctgaaggttttacttcaccttgcggggtttttgccgctggtctggttattctgggccgggcaccagggctactttagcgccgatccagccaaggatatccagcactttaccggcagaatggcgcttaagtttctgctggcgacgctgctggtctctccgctggcgcgctatgcgaagcagccattattgattcgcgttcgtcggctgttaggtttatggtgttttgcctgggcgacgctgcacctgaccagctataccctactggagctgggcattaacaatctggctctgctgggctcggagattatcacccgcccctatctgacattgggcatgatcagctgggcgattctgctggcgctggcggtgacctccacgcaagcgatgcagcgaaaactggggcgtcgctggcaacttttacacaacttcgtctatctggtggcgatcctcgcgccgatacactacctgtggtcagtgaagatcgtctcgccgcagcccgttgtatatgccctgctggcagcggggctattgacatggcgttacaagaagttccgccagtggtggcgcgcaatccggtaatgtgcagtttcccgcagatcctttatcaaccgcgactctttttcagatagcggttgataatcttccctgataagaccagtatttagctgccaattgctacgaaatcgttataatgtgcgactttggttttcctgacggggttttctgaccctgaaaaggtgacaagggcgcattgaaggtatatgttgttttttacccgaaaatggcaggagatcgccacacaatggcagtgaagtttcacattttgcttttgaatggtccaaacattaacatgctcggtacccgcgagcctgagaagtatggccctctcacgctggctgaaattgttaaccgtttaacatctgaagcggcggcgctgaatgtgagtctggatcacctgcagtccaacgcggagcatgcgttaatcgaccgaattcatcaggctaaagacaacgtggactatatcctgattaatccggccgcgttcacgcataccagcgtagcaatccgtgacgcgttgcttgccgtgaacatcccgtttatcgagattcacctgagcaatgtgcatgcacgcgaacccttccgccagcattcgtatctgtcagatatcgccgctggcgttatctgcggactgggggcggacggctattcatacgctttacagacggcggtaaaacgcctgtcacaatcacactaaacaaagagtacggaacccactcatggatattcgtaagattaaaaaactgatcgagctggttgaagaatcaggtatctccgaactggaaatttctgaaggcgaagagtctgttcgcatcagccgctctgcaccggccgcaagctatccggttatgcagcaggcttatgctgcgccgatgatgcagcctcaggcgcctgccgctgcggctgccgcgccagctgcagcggcagaagcgccggcgaaagcggaaatcagtggtcacatcgtacgttccccgatggttggtactttctatcgtacgccaagcccggacgcgaaagcgtttgtggaagttggccagaaagttaacgtgggcgacaccctgtgcatcgtcgaagcgatgaaaatgatgaaccagatcgaagccgacaaagccggcgtggtgaaagccattctgatcgaaagcggccaaccggtagaattcgacgagccgctggtagttatcgagtaacgaggcgaacatgctggataaaattgtcatcgctaaccgtggcgagatcgcactgcgcatcctgcgtgcctgtaaagaactgggcatcaagactgtcgctgtgcactccactgcggatcgcgatctaaaacacgtattgttagcggatgagacggtctgcatcggtccggctccgtccgtaaaaagctatctgaacattccggccattatcagcgccgctgagatcactggcgcggtagcgattcacccgggttatggcttcctctctgagaacgctaattttgctgagcaggttgagcgttccggtttcatcttcatcggcccgaaagccgacactatccgcctgatgggcgacaaagtgtccgccatcaccgccatgaagaaagctggcgttccgaccgttccaggttctgatggcccgctgggcgacgacatggacgctaaccgcgcccatgccaaacgcatcggctatccggtgatcatcaaagcctccggcggcggcggcggtcgcggtatgcgcgttgtacgtagcgacgctgaactggcgcaatccatctccatgaccaaagcggaagccaaagcggctttcaacaacgacatggtctacatggagaaatacctggaaaacccacgccacattgaaattcaggtgctggcggatggtcagggtaacgcgatctatctggctgaacgcgactgctccatgcagcgccgtcatcagaaagtggtcgaagaagcgccggcgccgggcatcaccccggaactgcgtcgctacatcggcgagcgttgcgcgaaagcctgtgtggatatcggctaccgcggggcgggtacctttgagttcctgttcgaaaacggcgagttctacttcattgaaatgaacacccgtatccaggtagagcatccggtaactgaaatgatcaccggcgttgacctgatcaaagagcagctgcgtatcgcagccggccagccgctgtccatcaagcaggatgaagtggtagttcgcggccatgcggtggaatgccgtatcaacgccgaagacccgaacaccttcctgccgagcccgggcaaaatcacccgtttccacgcgccgggtggctttggcgtgcgctgggagtcacatatttacgccggttacaccgtaccgccgtactatgactccatgatcggtaaactgatctgctacggcgaaagccgtgacgtggcgattgcccgcatgaagaatgcgctgcaggagctgatcatcgatggcatcaaaaccaacgtcgatctgcagatgcgcattatgagcgacgagaatttccagcatggtggcaccaatatccactatctggagaaaaaactcggcttgcaggaaaaataattctgctctctcagcaaaaggccgggtaaaccggccttttttctttttctctctcctcatctataccatgcggtacaatccccgctttcttcatcctcaagggacaaaaaatggacaaacgctttgttcaggcccacaaagaagcgcgctgggcgctgtggctgacccttctctaccttgccgcctggctggccgccgcctatctgccgggggtggctattggctttaccggcctgccacattggtttgaaatggcctgcctgctggtaccgctgctgttcattctgctgtgctgggcgatggtcaaactgattttccgcgatatttctctggaggacgatgatgcagtttgaggtcattattcccctgatcgcctacctggtggtggtgttcggtttatccctctacgccatgagaaaacgcgcctcaggtagctttcttaatgagtactttctcggcagccgctcgatgggcggcttcgtgctggccatgacgctaaccgccacctatatcagcgccagctcatttatcggcggacccggcgccgcctataaatacggcctgggctgggtgctgctggcgatgatccagctccccgccatctggctgtcgctgggcgtgctggggaaaaaattcgccatccttgcgcgtcgctataatgctgtcaccctcaatgacatgctgtttgcgcgctatcagagtcgcctgctggtctggctggccagcctgagtctgctggtggcctttgtcggcgccatgaccgtccagtttatcggcggcgcccgcctgctggagacggctgccggtattccttacgataccggcctgctgatcttcggggtcagcatcgcgctgtataccgcctatggcggctttcgcgccagcgtgctcaacgacacgatgcagggcatggtaatgctgatcggcacgatcgtgctgctggtgggcgtgatccacgccgccgggggggttggccatgcggtagagacgctgcagtcgatcgacgtcaagctggtgtccccgcagggcgcggaggatatcctctcgccaacctttatggcctcgttttgggtactggtctgcttcggcgttattggtctgccacataccgcagtgcgctgtatctcctacaaagacagcaaagccgtgcatcgcggcatcattatcggcaccatcgtggtggcgatcctgatgtttggcatgcatctggctggggcattaggccgggcggtgatccccgatttaaccgtgccggatctggtgatcccgacgctgatggttaaagtgcttccgccctttgccgccgggatcttccttgccgcgccgatggcggcgattatgtcgacgatcaatgcccaacttctgcaaagttccgctacgatcatcaaagatctgtacctgaactggcggccggatcaggcgactaacgaaaagcggcttaaacgcatgtccgccggcatcacgctcctgctgggggtcttgttgctgctcgcggcctggcggccgccggagatgataatctggctgaacctgctggccttcggcggcctggaagccgtcttcctgtggccgctggtgctgggcctttactgggaacgcgccaacgcggctggcgcgctgagcgccatgatcgtaggcggcgtcctgtatgccgtactggccacgctgaaagtgcagtttctgggctttcacccgatcgttcccgcgctgctgctgagtttgctggcgtttgtggcggggaaccgtttcggtcgtcccgccccacagccccccattttgactactgataaataaagagttttgctatgccatggatccaactgaaactaaataccaccggcgcgaacgctgaagatcttagcgatgcgctgatggaggccggatcggtctcgatcaccttccaggatacgcacgatacgccggtatttgagccattgcccggggaaacccgcctgtggggggataccgacgtaatcggcctgttcgatgctgaaaccgatatgaaagcggtcgttgcccaactggagcagcatccgctgctgggcgccgggttcgcgcataagatcgagcaactggaagataaagactgggaacgggaatggatggataacttccaccccatgcgcttcggggagcggctatggatctgcccaagctggcgcgatgttccggatgaaaatgccgtcaacgtgatgctcgatccgggtctggcctttggcaccggtacgcatccgacgacatccttgtgtctgcagtggctggatggactcgacctcaacggaaaaacggtgattgatttcggctgcggctccggcatcctggcgattgccgcactgaagctgggggcggcaaaagcaatcgggattgatatcgacccgcaggctattcaggccagtcgtgataacgcgcagcgtaacggcgtttctgaacgcctggagctctatcttcctcaggaccaaccggagtcgatgaaagccgacgtggtggtcgcgaatatcctggcaggcccgttacgtgagctggcgccgttaatcagcgtcctgcccgtttcaggcggtttgctggggctttccggcatccttgccagccaggcggagagcgtctgtgaagcctatgccgatctcttcgcccttgacccggtggtcgagaaggaagagtggtgccggattaccggccggaaaaactaagcgcgatgcggcctacgggccgcatttttgtttccagtagccaccaaataatgccaggaaatgagaggcagatcgcactacagagcacttttttggctacaaaaacagcgttttatatcgccatgcggccagtttatccaagaaaaatcgagaagttttatgattttataaatggacacaaattatccaccatccattaaatcaatgattaatataagtatttattcatcccttttacgctagtcccggattcattgatctgcaacagaggattgctcaaagtttggcctttcatctcgtgcaaaaaatgcgtaatatacgccgccttgcagtcacagtatggtcatttcttaactcatgcgcatcggacaccaccagctcagaaatcgcctgatcgcagcgcccatggctggcattactgacagaccattccggacgctgtgctacgagatgggagcgggtttaaccgtttccgagatgatgtcttctaacccacaggtgtgggagagcgacaagtcccgtttacggatggtgcatatcgatgagcccggtattcgtaccgtgcaaatcgccggtagcgtgccggaagagatggctgccgccgcgcggattaacgtggaaagcggcgcccagattattgatatcaatatgggatgcccggcgaaaaaggtgaatcgcaagcttgcaggttcagccctcttgcagtaccccgaccaggtgaagtcgatcctgacggcggtcgttaacgcggtggacgttcctgtgactctcaagattcgcaccggttgggaaccggaacaccgtaactgcgtagagattgcccaactggccgaagagtgtggcattcaggctctgactattcacggacgcacccgcgcctgtttgtttaacggagacgctgagtacgacagtattcgggcagttaagcagaaagtttccattccgattatcgcgaatggcgacattactgacccgcttaaagccagagctgtgctcgactatacaggggctgatgccctgatgataggccgtgcagctcagggaagaccctggatctttcgggaaatccagcattatctggacactggagagctgctgcccccgctgccgctggcagaggtgaagcgcttgctttgtgcgcacgttcgggagttgcatgacttttatggtcaggcaaaagggtaccgaatcgcgcgtaaacacgtctcctggtatcttcaggaacatgctccagatgaccagtttcggcgcacattcaacgccattgaggatgccagcgaacagctggaggcgttggaggcatacttcgaaaattttgcgtaatagaaataaagagctgacagaactatgttcgaacaacgcgtaaattctgacgtactgaccgtttctaccgttaactctcaggatcaggtaactcaaaagcccctgcgtgactcggttaaacaggcactgaagaactattttgctcaactgaacggtcaggatgtgaatgacctgtatgagctggtactggctgaagttgaacagcccctgttggacatggtgatgcaatacacccgtggtaaccagacccgcgctgctctgatgatgggcatcaaccgcggtacgctgcgtaaaaaactgaaaaaatacggcatgaactgatactagtcagttgcttgcttgatataaaaggcgctcttcggcatggggaagcgccttttttattatctgcgccaacagaactcattactgattcaccagccgtagcgcaggccctcccgataaacgcgcagcacagaccaccgccattatattatccaccagcgcaggcgcctgctgataaagatcgaagcgttgcggatcgagcagccagtttttaatcagcccggaaaaagcactgtgtaaaacaattaatatcatctcaatgtttgtttcggctggcaatatattgttacgcacgcagcactgcaggatgccgccaatgagtgaataattaaaaccaatacgttggcgaatttcgtattccgaaagcatatcactggaaaactcacagcgctgataaagaatttgcatcagagcgcgctgtcgaggattcgcagcaatatagcgcaggcctgcaataaaccgctcgcgtaaagcatttagcggctcatgttcgtactctatggcctgactgggctgaatcaaatctctaagcggcggctgctgctgccacatttcattaaacagctccgtcttactggcaaaatgccagtacaccgcgccgcgagtcactcccgccgcatcggcgatatccgtcagggtggtgttggttactccgcgcagggcgaactgctggattgcggactcaatcaggagctgccgcgtgcgctgcgcctcttcttttgtttttcttgccatacaaggccccacttcccgataagcagataatataggatattcttaattagaattaatctagcatttgccatgaagtattatttagcaaaaatgcagacaagttaatcctgatgcgaaaagagaattaattattcaagtgaatatcaccggaaaatacattcactgaaataatgtctatttatcaacttttacaattgcgataaatcgcaatactacagtgaccatttttttgtttttgcgtgccttgctgattgcttaaaaataagtatctcttacatccaacggcgtttatttgtaggatggcaaactgctttttgattccctctttctttcacagattcgccgcctgattgggtacgtaatctataaggaaccgccatgacgactcacgccagagtgacacttttatccggtttaattatctcggccttattgctaaccggttgcgataattctgacaaccagcaaccccatgcgcaggcgccgcaggtgacggtccatgtcgtgaacagcgcgccgctatcagtcaccaccgaactgccgggccgaacctctgcttttcgcgtagcggaagtccgcccccaggtgagcggtatcatcctgaagcgtaactttgttgaaggaagtgatgtcgaagcaggccagtcactctatcagatcgatccggcgacctaccaggcggcgtggaacagcgccaaaggcgatgaggccaaagccgaagccgcggccgctatcgcccatttgacggtgaaacgctacgttccactgctgggtactaaatatatcagccagcaggaatacgatcaggcagtggccaccgcccgccaggccgatgccgatgtcatcgccaccaaagctgccgtagaaacggcccgtatcaacctggcctacaccaaagtaacctcccccattagcgggcgcatcggtaaatcgagcgtcaccgaaggggcgctggtcaccaacggccagtcggatgccctggctaccgtccagcagctcgatcccatctatgttgacgtgacggagtccagtaatgacttcatgcgccttaagcaggaaagcctgcagcgcggcggtgatactaaaagcgttgagctggtcatggagaacggccaggcctatccgctcaaaggttcactgcagttttctgacgtcactgttgatgaaagtacgggctcaattactctgcgcgctatcttccctaacccgcagcatgtcctgctgccagggatgttcgtccgcgcccgcatagacgaaggcgtcgatccgcaggctatcctggtaccgcagcaaggggtgacccgcacgccgcgtggtgatgcctccgtgatgctggtgaatgacaaaaaccaggttgaaacccgggaagtggtcgcgactcaggccgttggcgataagtggcttatcaccagtgggctgaagccgggcgataaagtgattgtcagcggcttacagaaagtccgtccaggcgtcactgtcaaagcggaagcggagcgtacggcgccggccgtgcaataaggatacccagccatgtctaagttttttattcatcgaccggtcttcgcctgggtgctggccatcattatgatgattgccggcggcctggccattctgcagctgccgatagctcagtacccgacaatcgcccctcctgcggtagcgatctccgccacctaccccggtgcagatgcccagaccgtgcaggatacggtcacccaggttatcgagcagaacatgaacggcatcgacaatctgatgtatatgtcgtcgaccagcgactctgccggttcggtaaccattacgctcacctttaaatcgggtaccgatcccgatattgcccaggttcaggtgcaaaacaaactgcagctggccacgccgctgctgccccaggaagtacagcagcaggggattagcgtcgagaaatccagtagcagcttcctgttggtcgccggctttatctctgataacccgaccaccacccaggacgatatctctgactatgtcgcctccaatgtcaaagatcctattagccgcctcaacggcgtgggcgatgtgcagctgttcggcgcgcaatacgccatgcgcgtctggctggatggcaacctgctgaataaatacaacctgacgccggtggacgtcatcaatgcgctgcaggtccagaacgatcagatcgccgcgggtcagctcggcggtacgccagcgctgaaaggccaacagttgaacgcgtcaatcatcgctcagacgcggctcaaagatccgcaggagtttggcaaggtcacgctgcgggtcaatgccgatggctctgtcgtccatctgaaagacgtcgcccgcattgagctggggggagagaactataacgttgtcgccagaattaacggtaaacctgcctctggtctgggtattaagcttgcgaccggcgccaacgccctggataccgccaccgcgattaaagcgaagctggccgagctgcagccctacttccctcaggggatgaaggtggtttatccgtatgatacgacccctttcgtcaaaatctccattcacgaagtggtcaaaacgctttttgaagcaattattctcgtctttcttgtcatgtatctgttcctgcagaacatgcgcgcaacgctcattccaaccattgccgtacccgtggtgctgttgggaaccttcgcggtattgtcgatgtttggctactccatcaacacgctgacaatgtttggcatggtgttggcgataggtctgctggtcgatgacgctatcgtagtagtggaaaacgtcgaacgtgtgatggttgaggagaagctctcgccaaaagaagcgacggaaaaatctatgtcgcagatccagggagcgctggtgggtatcgccatggtgctctccgcagtatttgtcccgatggcctttttcggcggctcaaccggcgcgatttatcgtcagttttcaatcaccatcgtctccgccatggcgctctccgtgctggttgcgctggtactgactccggcgctctgcgccacgttgttgaagccagcctcagctgaacaccatgagaaaaaaggatttttcggctggtttaacgcccgcttcgaccggagcgttaaccactataccaacagcgtcagcggtattttacgtggaactggccgttatctggtgatctacctgctgatcgtcgtggggatggccgtgctgttcatgcgcttgcccacgtcctttctgcccgacgaagaccagggcgtcttcctgaccatgatccagctaccgtccggtgctacccaggagcgcacgcagaaggtcctggatacggtgacagactactacctgcataacgagaaggccaacgtcgaaagcgtctttaccgttaacggcttcagcttcagcggccagggacaaaactccggtatggcgtttgtcagcctgaagccctgggaagcacgcagcggcgataaaaacagcgtggagtccatcatcaagcgggccaccgtagcctttagccagatcaaagacgccatggttttcccgttcaacatgccagccattattgagctgggtaccgccaccggcttcgactttgaactgatcgaccagggcggactcggtcataccgctctgacccaggcgcgcaatcaactgctgggcatggtgaaacagcatccggatcagctggttcgggtacgccctaatgggctggaagatacccctcagttcaaactggatgtcgatcaggaaaaagcgcaggcgctgggcgtatcgctctccgatatcaatgaaacgatatcagccgcgctgggcggatactacgtcaatgactttattgaccgcggccgcgtgaaaaaagtgtacgttcaggctgatgcccacttccgtatgctgccgagcgacattaacaacatgtatgttcgtagcgccaacggcgaaatggtgccgttctccgcctttgtcacttcacgctggatatatggctcgccgcgcctggagcgctacaacgggttgccatctatggagatcctcggtgaagcttcgccaggcaaaagtaccggggaagccatggcgctgatggaaacgctggccagtaaactgccgagcggcatcggttatgactggaccgggatgtcttaccaggaacggctctccggcaaccaggcgcctgcgctctatgccatctcgctgatcgtcgtcttcctgtgtctggcggcgctgtatgagagctggtcgatccccttctcagtcatgttagtggttccgctgggggtcattggcgcgctgttagccgccacgctgcgtgggctgaataatgacgtttacttccaggtcggactcttgaccacgatcggtttgtcggccaagaatgcgatcctgatcgtcgagttcgccaaggatctgatggagaaagaagggaaagggatcattgaggccacgctggaggcatcgcggatgcgcctgcggcctattctgatgacctctctggcctttattctcggggtcatgccgctggtgattagccatggtgccggcagcggggcgcagaatgcggttggcaccggcgtgatgggcgggatgctgaccgcgacgctgctggcgatcttctttgttccggtgttctttgtggtcgttagacgacgctttacccggcacgctgaataactcggctatgtcttgaaggcgccccttgcgggcgctttttttcgcatgcaatattggcagccagctaaacgcgccacagtctggcaaccgccatcgcacgcagcatcgctgaatcacaatctttctctccatcttttctgcatattcccgggcttatcttcacgatatttacgcggctcatatattgagatgatttcggcctccggcccggacaattcgcggtgataaaataagccattccgttctgcactggctttcagtacaacccagcggattatccagaggtaatatcatgaaaaagtatttaatcgtggcgctgctggcctctctactggcaggctgtgcccatgactctccctgcgtaccggtttatgactcgcaaggccgcttagtccataccaatacctgtatgaaaggcacaacagaagacaactgggaaaccgcaggcgcaatcgccgggggtgcggccgcggtagccggcctcacgttagggatcgttgctctgacccgctaattcacccccgaccagcagatactggggctagcgtcgaacctgtatctgctcttctgcgcatcatccacatgacaaccgggcaaataaactctctgtcccttgctgcattacgagcaaatcgactttgacgggtttccccctggtggcaggactgtttatcaacagataacagataacacaaaagcaaaaggcccagtctttcgactgggccttttgctttatttgatgcctggcgattccctactctcacatggggagaccccacactaccatcggcgctacgacgtttcacttctgagttcggcatggggtcaggtgggaccgccgcgctattgtcgccaggcaaattctttacaacgtgccgaactttaacctaaaaagtggtgctgatacccagagtcgaactggggacctcacccttaccaagggtgcgctctaccaactgagccatatcagcacgctaaatttgatgcctggcagttccctactctcacatggggagaccccacactaccatcggcgctacggcgtttcacttctgagttcggcatggggtcaggtgggaccaccgcgctagtgccgccaggcaaattctgttttatcaacacgtctcaccgacgtatcgattaatctgtatcagagctgaaaattctctcaaatcgccaaaacatcttcggcgttgtaaggttaagcctcacggttcattagtaccggttagctcaacgcatcgctgcgcttacacacccggcctatcaacgtcatcgtctttaacgttccttcaggagacttaaagtctcagggagaactcatctcggggcaagtttcgtgcttagatgctttcagcacttatctcttccgcatttagctaccgggcagtgccattggcatgacaacccgaacaccagtgatgcgtccactccggtcctctcgtactaggagcagcccccctcaattctccagcgcccacggcagatagggaccgaactgtctcacgacgttctaaacccagctcgcgtaccactttaaatggcgaacagccatacccttgggacctacttcagccccaggatgtgatgagccgacatcgaggtgccaaacaccgccgtcgatatgaactcttgggcggtatcagcctgttatccccggagtaccttttatccgttgagcgatggcccttccattcagaaccaccggatcactatgacctgctttcgcacctgctcgcgccgtcacgctcgcagtcaagctagcttatgccattgcactaacctcctgatgtccgaccaggattagctaaccttcgtgctcctccgttacgctttgggaggagaccgccccagtcaaactacccaccagacactgtccgcaaccccggtaaggggccaacgttagaacatcaaacattaaagggtggtatttcaaggttggctccacgcagactggcgtccacgcttcaaagcctcccacctatcctacacatcaaggctcaatgttcagtgtcaagctatagtaaaggttcacggggtctttccgtcttgccgcgggtacactgcatcttcacagcgagttcaatttcactgagtctcgggtggagacagcctggccatcattacgccattcgtgcaggtcggaacttacccgacaaggaatttcgctaccttaggaccgttatagttacggccgccgtttaccggggcttcgatcaagagcttctccttacggataaccccatcaattaaccttccggcaccgggcaggcgtcacaccgtatacgtccactttcgtgtttgcacagtgctgtgtttttaataaacagttgcagccagctggtatcttcgactggtctcagctccacccgcaggggcttcacctacacaccagcgtgccttctcccgaagttacggcaccattttgcctagttccttcacccgagttctctcaagcgccttggtattctctacctgaccacctgtgtcggtttggggtacgatttaatgttacctgatgcttagaggcttttcctggaagcagggcatttgttacttcagcaccgtagtgcctcgtcatcacacctcagccttgattatccggatttgcctggacaatcagcctacatgcttaaaccgggacaaccgtcgcccggctaacatagccttctccgtccccccttcgcagtaacaccaagtacaggaatattaacctgtttcccatcgactacgcctttcggcctcgccttaggggtcgactcaccctgccccgattaacgttggacaggaacccttggtcttccggcgagcgggcttttcacccgctttatcgttacttatgtcagcattcgcacttctgatacctccagcaaccctcacaggtcaccttcgcaggcttacagaacgctcccctacccaacaacacatagtgtcgctgccgcagcttcggtgcatggtttagccccgttacatcttccgcgcaggccgactcgaccagtgagctattacgctttctttaaatgatggctgcttctaagccaacatcctggctgtctgtgccttcccacatcgtttcccacttaaccatgactttgggaccttagctggcggtctgggttgtttccctcttcacgacggacgttagcacccgccgtgtgtctcccgtgataacattcttcggtattcgtagtttgcatcgggttggtaagtcgggatgaccccctagccgaaacagtgctctacccccgaagatgaattcacgaggcgctacctaaatagctttcggggagaaccagctatctcccggtttgattggcctttcacccccagccacaagtcatccgctaatttttcaacattagtcggttcggtcctccagttagtgttacccaaccttcaacctgcccatggctagatcaccgggtttcgggtctataccctgcaacttaacgcccagttaagactcggtttccctgcggctcccctatacggttaaccttgctacagaatataagtcgctgacccattatacaaaaggtacgcagtcacacccgaaggtgctcccactgcttgtacgtacacggtttcaggttctttttcactcccctcgccggggttcttttcgcctttccctcacggtactggttcactatcggtcagtcaggagtatttagccttggaggatggtccccccatattcagacaggataccacgtgtcccgccctactcttcgagttcacaacctgtgcattttggtgtacgggactatcaccctgtaccgtcggactttccagaccgttccactaacacacaagctgattcagactctgggctgctccccgttcgctcgccgctactgggggaatctcggttgatttcttttcctcggggtacttagatgtttcagttcccccggttcgcctcgttaacctatgtattcagttaacgatagtgtgacgaatcacactgggtttccccattcggacatcgccggttataacggttcatatcaccttaccgacgcttttcgcagattagcacgtccttcatcgcctctgactgccagggcatccaccgtgtacgcttagtcgcttaacctcacaacccgaagatgtttcacttctgattgcgaaaatttgagagactcgaacacacattgactgtgtgtcgtttcaattttcagcttgatccagatttttaaagagcaaaatttcacaatgcacttcgcagtacattttgaaatttattatttatcaaacaatctgtgtgagcactacaaaggcaggttctttaaggtaaggaggtgatccaaccgcaggttcccctacggttaccttgttacgacttcaccccagtcatgaatcacaaagtggtaagcgccctcccgaaggttaagctacctacttcttttgcaacccactcccatggtgtgacgggcggtgtgtacaaggcccgggaacgtattcaccgtagcattctgatctacgattactagcgattccgacttcatggagtcgagttgcagactccaatccggactacgacatactttatgaggtccgcttgctctcgcgaggtcgcttctctttgtatatgccattgtagcacgtgtgtagccctggtcgtaagggccatgatgacttgacgtcatccccaccttcctccagtttatcactggcagtctcctttgagttcccggccggaccgctggcaacaaaggataagggttgcgctcgttgcgggacttaacccaacatttcacaacacgagctgacgacagccatgcagcacctgtctcacagttcccgaaggcaccaatccatctctggaaagttctgtggatgtcaagaccaggtaaggttcttcgcgttgcatcgaattaaaccacatgctccaccgcttgtgcgggcccccgtcaattcatttgagttttaaccttgcggccgtactccccaggcggtcgatttaacgcgttagctccggaagccacgcctcaagggcacaacctccaaatcgacatcgtttacggcgtggactaccagggtatctaatcctgtttgctccccacgctttcgcacctgagcgtcagtctttgtccagggggccgccttcgccaccggtattcctccagatctctacgcatttcaccgctacacctggaattctacccccctctacaagactctagcctgccagtttcgaatgcagttcccaggttgagcccggggatttcacatccgacttgacagaccgcctgcgtgcgctttacgcccagtaattccgattaacgcttgcaccctccgtattaccgcggctgctggcacggagttagccggtgcttcttctgcgggtaacgtcaatcgccaaggttattaaccttaacgccttcctccccgctgaaagtgctttacaacccgaaggccttcttcacacacgcggcatggctgcatcaggcttgcgcccattgtgcaatattccccactgctgcctcccgtaggagtctggaccgtgtctcagttccagtgtggctggtcatcctctcagaccagctagggatcgtcgcctaggtgagccgttaccccacctactagctaatcccatctgggcacatctgatggcatgaggcccgaaggtcccccactttggtcttgcgacattatgcggtattagctaccgtttccagtagttatccccctccatcaggcagtttcccagacattactcacccgtccgccgctcgtcacccgagagcaagctctctgtgctaccgctcgacttgcatgtgttaggcctgccgccagcgttcaatctgagccatgatcaaactcttcaatttaagtttgatgctcaaagaattaaacttcgtaatgaattacgtgttcactcttgagacttggtattcatttttcgtccaaggacgttaagaatccatgtcactttgagtgcccacacagattgtctgataaattgttaaagagcagttgcgacgcgctttagcgctctgtcgcgaggtggcgtatattacgctttcctctttcagagtcaacccgtttttcaggatttttctctgcaaccgaaccggctgtttgtgtgaagtgattcacatctgccgtgtcagtgggtgcgcattatagggatcccatttttttgcacaagccttttttcgatctttttttctgaatggtgatttttcacccttttcgccgtgtaattgcacgatttgctcaattttcaccgttttcaggggttgcacaggaagataaaagccaccaaagtcttcttatgctcccgtatttttgaggtctatatgtctgctcagctgcgcccctacaaagcatttttcccacaaatcggtcttcgcgtcatgattgacgcatccagcgtcgtcatcggcgatgtcagaattgccgatgacgtcagcgtctggcctctggtggccattcgcggcgacgtcaactatgtatcgataggtcaacgcagcaatattcaggacggtagcgttctccatgtgacccataagtcctcttataagccggagggaaatccgctgatcattggtgaggatgtaactgttggtcataaagtgatgctgcacggctgcactatcggcaaccgcgtactggttggcatgggttcgatcttattagatggtgtcgtcgttggcgacgacgtcatgataggtgcgggaagtctggtaccgcagaacaaacagctggaaagcggctacctttactttggcaatccggtcaaacagatccgccccctgacagaggcggaacgggaaggactcaagtattcagcaaataactatgtgaaatggaaaaatgagtacctggatcaggataaccagatccagccctgagcatcttcctgaccatcgcggatcaatgcttctgcctcttcctctagatcccaacgatgttcctggaaggcggccagccactgcgctggcccctctgcaccgaaacgctgctgcaggatttgccctgaaattgcgcaggttaattgcatcccattcaccagcgcgggaaaaaccacgccctgccgttcggcatcccatgattcccggtcaggaaactgaatcgcctgattcatgcattcagttcctgctgcagcgtttcaatgaccggagcgatagccggcagaacgccgtgccatagcagaacagcatgggcggcttgcgccaccagcattcccagcccatcggcacagtgaactgcgccatattgctggcaccagtgaagaaacggtgtcggccctttctggtaaaacatgtcatagcaatatacgtcagcgttgacaatagatgccgggatagctggtacatcaccgtctattccactggacgtcgcattgacgatcagatcgaatgtttccccggataaggtatccatctcccttgcgctaacgctcccggtatgggcgaagagagtggctaactcacgggcacgagaataggtgcgattcacgatcgtgacggcgcatcccagcgacagaagcggcaaaagaacaccgcgagatgccccaccagcaccaacaagcaggatccgttggcgtggcttaatgaatcccaggcgttccagatcgctcagaagaccaataccgtcggtgttgtcccccagtaaacggccatcttccaggcgtttcagggtgtttactgctcccgccagcgctgcgcgttctgtcagttcgtcggcacgcgcaaaggcttcctctttaaaaggaacggtgacgttggccccctttcctccttctgcaaagaactgattcagagaagagacaaaatcgtccagcggcgccagtacacgtccataaggatgagtaattcctaactggcgggcaaacagctgatgaatagcaggcgacttgctgtgcgcgatcggattaccaaaaacggcataggtttccatggttcacccctggcggaacagttcacccgtcagggcatcacggatttcagatgggttttgccggccgcccgtggcgccatccaccaccgggaagctgtcgccaaactgagcatggacctctgcggtagtacggcacggtggttgcccggtgagattggcgctggtcgaaaccagtggttttccgtaggcttcgcacaattcgattaccagcggatggttagtcacgcgtacggccagtgaatcaaaacgtccagtcagccagcgcggcgtttcaggacgcgccgggaatacaaacgtcaccggtcccggccagcaagagaagatggcttcccgctgtgagtcacttaaccgtgaatcatcaatatagggcttcagttgctcaaagctggcggcgataaggatcaatcctttctcaacaggacgctgcttcagctccagcaggcgcataacggccgtttcgctgtcagggtcgcagccgacgccaaacacagcttcggtgggataggcgatgacatgttcatttttcaggaccgccacggcatgggcgacggcttctgagggcaggttattgttcactgatttattccgccgggatcggctttccacattgtttactggcacagaagcgtctgagcccctgcgccgtcttcttttctattaacagcgggtaatggcattcagggcattcgcccgccaccggtttaaaattgataacgaactggcaatcaggatagcgatcgcaggagtgaaaggttttaccgaaacgggaacgacgctggaccagatggccttgtccgcactgcgggcaagcgatagccgtctcatcgggtttatcaatcagctcggtatgttcacattccggatagcggctacagccaatgaacatcccaaaacgcccctggcgtaacaccataaccgcaccgcacgatgggcactcttgcccctccagcaccttaacgatatgcccgtccgcctggcttttcaggggacgaatatagtcacagtccggataatgcgaacagccgagaaacgggccatgtttcccggaacggatcaccagttcggccccgcactgcgggcagggctcatttttacgcaccgaaaacagtgctgatttggtcataacaactcgatgttgctgcaaaaagattaatgcagcataccttcatttacttcgaagagtaattcttccatttgctgataggcgttttcacagcccggaatattgaacagtaccatcaggatgacccatttcaggtcttccagctcaaattccgccgtatccagcgccagtacgcgctctatcaccatttctcgcgtttcgaggttcaacacctgaatctgctcgaggaagagtaaaaacccccggcaactggcatccagacgctggcactcctcttcggtatatacccgaagagagagcgggtcggaagcgagctgcatgggttcaacgagaccttcctgataatcagccagtttctcgagccacattaacgcgttatagatgtcttcccgctcaaaacccgcatcggtaagatcccgcgtcagtttgtcctgatccacgcgcatttctgcttcgctatggatgtaagtttcaaacaaatacatgagtacgtcgaacatggcttgccctccttaatcggacatagccgccgggtacagctgcgatccagcctgctaactccagttcaagtagctgagctacggttactggcacagattggccggcacgttcagcgacaacgtcaacaggtgttacctcatctcctacgttagccaggagctccggaaatggcaatgctacagacggctgatcgacgcaaatatttatcgaatcagacgtatcagtcagccaggccagctcgttatgccagtattccacaatatcctctggcgaggtcactggcaccgcgccttgcttaattaaccagtgcgggccttccgatcccggattgcctatcgggccaggcagggcgaacacatcccttccctgctccagggcgcagcggacggtgaccagcgatccgcttcgcaacgccgcctcaatcaccagcacgcccaggcttaagccgctgataatccggttgcgcctggggaaatgtgcgggaagcggcggcgtaatgagtggaaattcagataccagcgtaccgccattgtcgatgatctgccgggcgagagttgcatggcgccgcggataaacctgactcagcccattgcccagtaccgcgatagttttaccctccgccgccagcgcgccgcggtgcgcgaccccgtcaatgcctaacgccagcccactggtgatggtaatccctttatgcgccagcgtttcgctgaacagtttcccccagcgggcgccataccaggagtgcgagcgactgccaataacggcaagctgcgcgctgtgaagcagggcgaggccgccgctgaccagcaacgcgccggggtaatcagcgatagactttaaccgcaatggatagcgcggatcgtcaccccgtaacagatgatgatccggttgttccagccagcgccgcgtctcgtcaagctcatgctcgtcaagccggaaaaataactttgcctgcgccgcggtcatcccgacggcatgcagcgcttcacgatcaacgctggcggctgcgcataagcgctgagcgatctctaccatcctgtcgccatacaagctactgaccttcatcagccgcagccaaatctcgtcgggcgtcatccttaccccctgccataagcggtattgacaatctttgcgattggacagtgagactgtcaattgcagggggttttgtctagaatagagctaataatcttatcaactcctgaatacgactctggaactttatggcagttttgcaagtgttacatattccggacgagcgccttcgcaaagtcgccgagccggtcaaagaagtgaatgcggaaattcagcgtatcgtcgatgatatgttcgacaccatgtacgccgaggaaggcatcggtctggccgcaacccaggtcgatatccatcagcgcattatcgttattgatgtgtcggaaaatcgtgaagagcagctggtattaattaacccggaaatgctggagaaagatggcgaaaccggtattgaagaaggctgcttgtccattcctgaacagcgcgccctggtgccgcgtgcggaaaaagtgaagatccgggcactggatcgcgatggtaagccgtttgaactggaggccgatggcctgctggctatctgtatccagcatgaaatggatcacctggtcggcaaactgtttattgactatctgtcaccactcaaacaacagcgcattcgtcagaaggtagagaaactggatcgtttacgttcccgtgcctgataacaaggaataccgtgtcacaatcactacgtatcattttcgccggcacccctgattttgcagcgcgtcatcttgatgcgctgctgtcgtctgaacatcaggttgttggcgtattcactcagcctgatcgccctgctggtcgcggcaaaaaattgatgccaagcccggtaaaagtactggcagaagcccataacttacctgtgttccagccatcctccctgcgtccgcaggataaccagcggttagtcgccgatctcggcgccgatattatggtggtagtggcgtacggtctgattctgcctaaagcggtgctggagatgccccgtctgggctgtatcaacgttcacggctcgctgctaccgcgctggcgtggcgcagcgcctattcagcgttcactgtgggcgggggatagcgaaactggcgtaaccatcatgcagatggacgtcggccttgatacgggggatatgctgtataagctttcctgtcccattaccgcagaggataccagcggcagcctgtacgataagctggccgagctcggccctcaggggctgctggcaacgttagcccagctggccaacggcaccgcacggcctgaagtacaagatgaatcgctggtgtgccatgccgaaaagctgagtaaagaagaggctcgtatcgattggtcgctttccgctgcgcagttggaacgctgcatccgcgcgtttaatccgtggccaatgagctggctggaaattgacggacaaccggtaaaagtgtggcgagcatcggtcatcgccgaagccgctcacgccgaaccgggtactatcgtggcagcaaccaaacagggtattcaggtcgccacgggggatgggatcctcagcctggagtcgctacagcctgcgggtaaaaaagcgatgagcgcccaggacttactcaattcccgccgggagtggtttatccctggcacccgtctcgcctgacggtcgtctcttctgaagcccgggttcgccgggcatttttatttttgcgcttatgaaaaagaatataaatttacgcagcctggccgcccaggctatcgagcaagttgttgaaaaagggcagtctttaagcaacgtactgccccctctacagcagaaagtcagcgataaagataaagcgctactgcaggagttgtgctttggtgtactacgtactctaagccagctggagtggcttatcagcaagctaatggcgcgtccgatgaccggcaaacagcgcaccgtgcactttctgatcatggttggtctctatcagttactctacacccgcattcccccgcatgccgcgctggcggaaacggtagaaggcgcggtggccattaaacgcccgcagcttaaagggctgatcaacggcgtgctacgccagttccagcgccagcaggaagcgttgttagccgaatttgctgagcatgaaaaccgctatcttcatcccaaatggctgctgaaacgcctgcagcaggcctggccggagcagtggcaggagatcgtcgaggcgaacaaccagcgcccgccgatgtggctgcgcgttaaccgcaaccatcattcccgggatgagtggcttgccctgcttaacgaggccggtttagagggctttacccaccctgattatccggacgccgtacgcctggccacccctgctccggtccacgcgttaccaggctttgccgaaggctgggtgaccgtccaggatgcctcggctcagggctgtatgcgctacctgcaaccggaaaatggcgaacgcattctcgatctctgcgcggcgccgggcgggaagacgacgcatattctggaagtcgctccccaggctcaggttatggcggtggatattgatgaacagcgtctgtcccgcgtctatgacaacctgaagcgtctgggtgtaaaagcggaagtaaaacagggcgatggtcgcttccctgagcagtggtgtggcaatgagcagttcgatcgtattctgctggatgctccctgctccgcaaccggcgttattcgccgccatccggatatcaaatggctgcgccgggatcgggatatcgccgagttagcccaactgcaggccgagatcctcaatgccatctgggggcacctgaagccaggcggcacgctggtttacgcaacctgttctattctgccggaagagaacagtcagcaaattgccgccttcctcgcgcgaactccggatgcagaacttcacgcaaccggcacgccggcgagccccgggcagcaaaatctgccgggcgtggaagaaggtgatggcttcttttacgctaagctaatcaaacgtcggaactaatgggttactgcagatgaagattattattctgggcgccggccaggtcggcggcacgctggcggaaaacctcgtcggcgagaacaatgatattacgctggttgataccaatggcgaccgtctgcgcagcctgcaggataagttcgacctgcgtgtcgtccaggggcatggctctcaccctcgcgtactgcgtgaggcgggggccgatgatgccgatatgctggtagcggtcactagttcggacgaaaccaacatggtggcctgccaggtcgcttactcattgttcaatacgccaaaccgcatagcgcgtattcgtgcgcctgattacgttcgtgatgcggaaaagctcttcaactctgaagcggtacccatcgatcacttaatcgctccggaacaactggtcatcgacaacatccaccgtctgatcgaatatcccggcgcgctgcaggtcgtgaacttcgcagaaggaaaagtcagtctcgcggtagtaaaagcctattatggtggcccgctggtggggaatgccttatccactatgcgggagcatatgccgcatatcgatacgcgcgtggccgccattttccgccacgatcgccccatccgcccgcagggctcgacgattgtcgaggccggagatgaagtcttctttattgccgcctcgcagcatattcgcgcggtcatgagcgaactgcagcgactggaaaagccgtataagcgtattatgctggtcggcgggggcaatattggcgcgggtctggcccataagctggaaaaagattacagcgttaagcttatcgaacgtaatcagcagcgagccgctgagctagcggaaaagctgcagcatactatcgtcttctacggggatgcatcggaccaggagctgttggctgaagagcatattgaccaggtggacctgtttattgccgtcactaacgacgacgaagccaatattatgtcggctatgttggccaagcgaatgggcgcgaaaaaagtgatggtgctaatccagcgcagagcctacgtggatctggtccagggtagcgtcatcgatattgcgatttcgcctcagcaggccacaatttccgcactcctcagtcatgtccgtaaagccgatattgtcggcgtctcctccttgcgccgcggcgttgcagaagcgattgaggcagtcgcgcacggcgatgagagcacctcccgggtagtcgggcgttcgatcgatgagatcaaacttccaccgggcacgatcatcggcgccgtcgtgcggggcaatgacgtgatgatcgccaataataatctacggatcgagcagggcgaccatgtgatcatgtttttgaccgataagaagtttatttccgatgtcgaaaggctgttccagccaagtcctttcttcctgtaattcccagggcgccgaacaggcgcctttttattatcccttattattcaaaggttaatattttgcagtaactatctgctgggaatggcaaatgaaaatacatttgttaaacttacaacgtcagctggcacaaggagaataaaatgagttttttaaaagagtttcgcgaattcgcgatgcgcgggaacgttgtcgatttggcagtgggtgtgatcatcggtgcagcattcggtaaaattgtttcatcactggtcgcggatattattatgccgccactcggcctgttgattggcgggatcgattttaaacagtttgccgtcacgctacgtgatgcccagggcgatgtcccggctgtggtgatgcattatggggtattcattcagaacgttttcgatttcatcatcgtcgcgtttgccatcttcatggcgattaaattgatgaataagttaaatcgtaagaaagaagaggctccggcggcaccgccagccccctctaaagaagaagttctgctgagcgaaattcgcgatctgctgaaagaacaaaacaaccgttcttaatcagcagagaaagcagaaggccagtggtaaaaaagcgattcgcttgcttgccactggcctcccgatcaacccttcctgcatgtttatctttacgttgatagcttcctttccctttcttgtttttctctacgcgctgcctgaataacggatcgtggagaagtgcctcaatggcgttatctttaatttgtcctttagtatgctgatagcgactcatagttactccggtatatgtataaactcggcgcgagtgtagatccgcgcgtttaaaaaatcaacgtccgccattgccgttgctggccccttgttcaagggcctcaaggatagaacagtaaacgctgctgtgggcagtgccgcaacaggcatcgttgagccgctgcagagagcggcgcatcgtctgtagctctttaatccgcgcctcgacttcacttaatcgcgcctgaacgatccctttcgactcctgacaggtatgatgctccggatcgatgcggatcgacaataattcgcggatcgcttccagggtgaaacccagttgtcgggcataacgaataaagcgcagccgttgaagatcgttatccgagtacagacgaaatcctccctcggtgcgtatgtcatgatccatcatctgctgcttttcatagtagcggatggtatcaggcgtcacgtcagccagttttgccaattcaccaatacgatacatatttactcctgatttattttttgcagcaacgcatcggcgtactcaccgcgtaaaaagtcggtgttcagacctgcctgacgtaacttcagctcgagcagggcaaggcgtttgctaagttcggcatgacgcggatcgtcctgacggacgccattcagtaaatctgccagagccaacgcttctttgcgttgctccagttccggaggaagacatcctgcatttttcagaaggcgatagcctgcccgcaactccgtcggcacatgtgaatcgtcatcgagagtcagcggttctccgctgccgggtaaattatcgaactcacctttggtttgggcatcgaggatatgacgttccgcccactgatccagcaaccacattctacggctccaggggatgaacaaaaagagtacagatagtgtagtgaaatggggatggggtagatataaaaaaacccgccagggcgggtttttttacgttactacagattactctgcagcagcttctgctttcggctcagcacgatcaaccagctcgatgtatgccatcggcgcgttgtcgcctgcacggaagccacacttcagaatgcgagtgtaaccaccggcgcggctcgcgaaacgcgggcccagctcgttaaacagttttgccacgatctcgttatcacgagtgcgggcgaatgccagacgacgattagcaacgctatcagtcttggcaagagtaatcagcggctcaactacgcgacgcagttctttcgctttcggcagggtcgtcttgatgatttcatgacgaaccagcgaacctgccatgttacggaacatagcctggcgatggctgctgttgcggttcagttgacgaccactcttacgatggcgcatgaccttatccttctcagtaaaaccttaacctgtgatccggttactcgtcagcaatgcttgctggtggccagttttccaggcgcatgcccagagacagtccacgggaagccagcacgtctttaatctcagtaagagattttttacccaggttcggcgttttcagcaactcaacctcggtacgctgtaccagatcaccgatatagtggatagcttctgccttgaggcagttagcagagcggacagtcaattccagatcgtcaacagggcgcagcaggatcggatcgaattctggtttctcttctttcacttctggctgacgtacatcacgtaggtcaacaaaagcttccagttgttcagccaggatggttgccgcacgacgaatcgcctcttcaggatcgattgtgccgttggtttccatttcgatgaccagcttgtccaggtcggtacgctgttctacacgcgcagcttcaacattgtaggcaatacgctctacagggctgtagcaggcgtcgaccagcagacggccgattgggcgctcatcttcttccgaatgaattcgggcagaagccggcacataaccgcgaccgcgctgaactttgatacgcatgctaatagcagcgttctcatcagtcaggtggcaaatcacgtgctgcggcttgacgatttcgacatcaccgtcgtgggtaatgtcggctgcggtcacagggccaatgccagatttattcaaagtaaggatgacttcatctttaccctgaactctcaccgccagccctttcaggttgagcaggatttcaaggatgtcttcctgaacgccttctttggtgctgtactcgtgcagtacaccatcaatctcaacctcggtcaccgcgcaacccggcatcgatgagagcagaatacggcgcagtgcgttacccagagtatggccgaagccacgctctaaaggctcaagggtcaccttggcgtgcgtcgaactcacttgctcgatatcgaccaggcgcggttttagaaactctgtcacagaaccctgcattgtgtcctctctttggtactaagctttacttggagtaaagctcgacgatcaggtgttcgttaatgtccgcagacagatcagaacgctccggctgacgcttgaacgtaccttccatcttgccagcatcaacttccagccaggttggcttttcacgctgctcagccagctccagagcggctttcacgcgagattgctttttcgctttctcacgaatgctgacaacgtcattcgctttaacctgataagaagcgatgttaacaacacgaccgtttaccataatcgctttgtggctaaccagctggcgtgcttcagcacgagtggcgccgaagcccatacggtatacaacgttgtccagacgaccttccagcagagccaacaggttttcaccggtgttgcctttcagacgtgctgcttctttatagtagttacggaactgacgctccagcacaccgtacatacggcgaactttttgcttttcacgcaactgcacaccatagtcagacagacgcggcttacgcgcaccgtgctggccaggagcttgttcaattttacacttggtatcgatcgcgcgaacgccagacttaaggaataagtcggtgccctcacgacggctcagcttgagcttaggacccaaatatcttgccattttctttctccaactaacctggaaaacgcagcgttatacgcgacgttttttcggcggacgacaaccgttatgagggatcggagtcacatcagtaatattagtgatgcggaaaccagcggcgttcagtgcacgaatggtagattcgcgacccggacccggacctttgaccataacttccagattcttgatgccgtattcttttacggcttctgcgcaacgctctgctgcaacctgagctgcgaacggagtggatttgcgagaaccacggaaaccggaaccaccggctgttgcccaacccagtgcgttaccctgacgatcagtgatggtaacgatggtgttgttaaaagaagcatggatatgagccacgccgtcagagacttgttttcttacacgcttacgtgcacgaattggtgcctttgccattattcaatcaccccgattatttcttgatcggtttacgcggacccttacgggtacgtgcgttggtcttggtacgctgaccgcgaaccgggagaccacgacgatgacgcaaaccacggtagcaaccaaggtccatcagacgcttgatgctcagggtgatttcacggcgcagatcaccttcaacgacaaatttacctactgcttcacgcagaatatcaatttgttcttcagacagctcactgatcttaacattttcagcgatgcccgtttcagcgcagatggctttagaacgggttttgccgataccgaaaatagcggttaaagcgataacggtatgtttgtgatcaggaatgttaatgcctgctatacgggccactatgcactcctactatttaatatgtacgcaccatgctgaaaagcccgttttcaggatactcaaatggaaacgtacagacatacaaaagattggctggctaatctagccagctcaatccaactttgcaagaaaaatatgcgaaaaaatcagccttggcgctgtttatgcttcggctcggcactgcaaatcacacggatgacaccatcacgcttaacgattttgcagttacggcataatttcttgacggaagcacgaactttcatttttactctccgtaacttctcgggcgaccagttttaacggccgtagcctttcaggttcgccttcttcaatgcagactcatactgactggacatcatcagagtttgcacttgagccataaagtccataatcacgacaacaacgataagcagcgaggtcccaccgaagtagaacggcactttcatcgcgtcacgcatgaactccgggatcaggcagataaaagtaatgtacaacgcaccaaccagagtcaggcgagtcatcactttatcgatatacttcgccgtttgctctcccggacgaattcctggtacaaatgcaccggacttcttcaggttatctgctgtttcacgcgggttgaaaaccaacgccgtgtagaagaaacagaagaagatgattgcagacgcatagagtaacacataaagcggttgcccaggctgcaaatacagcgaaattgttgtcagccagttccaaccagtaccacccccgaaccatgacgtgatggttgccgggaacagtataatactggaagcgaagattgccgggattacccccgccatattcactttcagcggtaaatgtgtgctctgtgcagcatagacacgacgaccctgttgacgtttcgcgtagtttaccacaatgcggcgttgaccacgctcaacgaatacaacaaagaaggtcactgcaaatactaatactgcaaccaacagcaacaggaggaagtgcaggtcgccttgacgcgcttgctcgatagtatgggcgatggccgcggggagtcccgcaacgataccggcgaagataatgatcgagataccgttaccgataccacgttcagtgatctgttcgccgagccacatcaggaacatagtccctgtgaccagactgacaacagcggtgaaatagaatgcaaagcctggattaatcaccaggccttgcataccaggcatattcggcagaccggtagcaataccgatcgactggaatatcgccagcaccagagtaccgtagcgggtgtactggctgatcttacgacgaccagactccccttctttcttcagttccgccagcggttgataaaccaccgtcagcagctgcacgatgatcgatgccgaaatgtacggcataatccccagcgcaaagatagaagcacggctgagagcaccaccagagaacatgttgaacatttcaatgatggtgcctcgctgttgctcaagcagtttggcaagtacagcggcatcaataccagggatcggaataaaagagccaatacggaacactatcagcgcaccgaccacaaacagaagtctgcgtttcagttcgccaaggccacctttggcactttgaaaatctaatcccggttgtttagccatctgctacttattcctcaattttaccgccagcagcttcgatagcagcacgagcacctttagtcacacgcaggccacgaacagttaccggacgagttacctcaccagacaggatcactttcgcgaactcgatctggacaccgataatgttagccgctttcagcgcgttcaggtctactacatcgccttctacgtgagccagatcggagagacggatctctgcggtgatcatcgctttacgagaagtgaagccgaatttcggcagacgacggtacagaggcatctgaccaccctcgaaaccgcgacgtacgccaccgccagaacgagatttctgacctttgtgaccacgaccaccggttttaccgaggccagaaccgataccacgacccaggcgtttacccgcctttttggagccttcggccggagacagagtatttaaacgcatctcttactcctcaactttaaccatgaaggaaaccgcgttgaccataccacgaacagcaggagtatcctcgcgctctacggtgtgaccaatacgacgcagacccaggccaagcagcgttgccttgtgtttcggcagacgaccgattgcactgcgggtttgagtaattttaatagtctttgccatggtttatttccccagaatttcttcaacggatttaccacgcttggcagcgaccatatccggggacttcatgttttccagaccgtcgatagttgcacgaaccacgttaatcgggttagtggaaccatacgctttagccagaacgttacgaaccccagcgacttccagaacggcgcgcattgcaccaccggcgatgataccggtaccttcggaagccggctgcatgaatacacgagaacccgtgtgagtacccttaaccgggtgctgcagggtgccgtggttcagcgcgacgttaatcatattgcgacgggctttttccatcgctttctggatcgctgctggaacttcacgcgctttaccgtaaccaaaaccaacgcgaccgttaccatcgcctactacagtcagagctgtgaaggagaaaatacgaccacctttaacggttttagatacgcggtttaccgcgatcagcttttcctgcagttcgccagcttgtttttcgatgtgagccatcttacacctctaccttagaactgaaggccagcttcacgggcagcatctgccagtgcctggacacgaccatgatattggaacccggaacggtcaaaggaaacatctttgatgcctttttccagagcgcgttcagcgacagctttacccacagctgctgcagcgtctttgttaccggtgtacttcagttgttcagcgatagctttttctacagtagaagcagctaccagaacttcagaaccattcggtgcaattacctgtgcgtaaatgtgacgcggggtacgatgtaccaccaggcgagttgcgcccagctcctggagcttgcggcgtgcgcgggtcgcacgacggatacgagcagatttcttatccatagtgttaccttacttcttcttagcctctttggtacgcacgacttcgtcggcgtaacgaacacccttgcctttgtaaggctcaggacgacggtaggcgcgcagatctgctgcaacctggccgatcacctgcttatcagcgcctttcagcacgatttcagtctgagtcggacattctgcagtgatacccgcaggcagctgatgatcaaccgggtgagagaaacctaaagccaggtttactacattccctttgaccgctgcacgataacctacaccaaccagctgcagcttcttagtgaagccttcggtaacaccgataaccattgagttcagcagggcacgcgcggtaccagcctgagcccaaccgtctgcgtaaccatcacgcggaccgaaggtcagtgcattatctgcatgtttaacttcaacagcatcgttgagagtacgagtcagctcgccgtttttacctttgatcgtaataacctgaccgttgatttttacatcaacgccggcaggaacaacgaccggtgctttagcaacacgagacattttttcctccgattaggctacgtagcagataatttcgccaccaagaccagcctggcgcgctgcacgatcagtcataacacctttagaggtagaaacaactgcgatacccagaccggccataactttcggcagctcatcttttttcttatagatgcgcagacctgggcggctgacacgctgaatgctttctacaacagctttgccctggaaatacttgagagtaagttccagttcaggcttggtgtcgccttcaactttaaaatcttcgataaaaccttcttccttcagcacgttggcgattgccactttcagcttggaggaaggcatggtgaccgcagctttgttcgcggcctgaccgttacggatacgggtcagcatatccgcgatcggatcttgcatgctcatctgtctttactcccgtgattcaattggtgacaattaccagctagcctttttcagacccgggatttcaccgcgcatagcggcttcacggaccttaatacggctcaacccgaacttccgcaggaaaccatgcggacgacctgtttgacggcagcggttacgctgacgagacgggctggaatcacgcggcagagtctgcagcttgagaacggcattccaacgatcttcgtcggttgcgttcacatcagagatgatagctttcagttcagcgcgtttagcgaagaatttatcagctaaagccacgcgctttacttcgcgtgctttcattgattgcttagccattaagtaaccctaccttacttgcggaacgggaagtcaaaggcagccagcagagcacggccttcttcgtcagatttcgcagtagtggtaatggtaatatccaaaccacgaacgcggtcgactttatcgtagtcgatttctgggaagatgatctgctcacggacacccatgctgtagttgccacgaccgtcgaaagacttagcggacaggccgcggaagtcacgaatacgcggtacagcaatagtgatcaggcgctcaaagaactcccacatgcgttcgccacgcagagttactttacagccgatcggatagccctgacggattttgaagcctgcaactgatttgcgtgctttggtgatcagcggtttttgaccggagattgctgccaggtcagctgctgcgttatccagcagtttcttgtcagcgatcgcttcaccaacacccatgttcagggtgatcttctcgacccgagggacttgcatgacagaattgtagttaaactcagtcatgagtttcttaactacttcgtctttgtagtaatcatgcagtttcgccatcgtactactccaaattacttgatagtttcgctgttagacttgaagaaacggacttttttaccgtcttcgaatctaaagcctacacggtcagccttgccggttgccgcattgaagattgcaacgttagaaacctgaattgcagcttctttttcaacgatgccgcctggttggttcagagccggaaccggcttctggtgtttcttaaccaggttgataccttcaacaatgaccttgccggaagacaggacattcttaactttaccgcgcttacctttatctttaccggttaacacgataacttcgtcatcacgacggattttcgctgccatgattcgctccttagagtacttctggtgccagagagataattttcatgaacttctcggtacgaagttcacgagttaccggcccaaaaatacgcgtaccgataggctgctcgctgttattgttcagaataacgcatgcattaccatcgaagcgaatgacagaaccgtccgggcgacgaacacccttcttggtgcgcaccactaccgccttcagcacatcaccttttttgaccttaccacgcggaattgcttctttgatggtgatcttgatgatgtcgcctacgcctgcgtagcgacggtgcgagccacccagaaccttgatacacattacgcgacgtgcaccggagttgtcggcgacgttcagcatagtctgttcttggatcattttagtgctccgctaatgtcaactactactgagacccgaaaattagggtcgttaaaaagccccatatcgagggcgcggcattataacaccacaaaccagatatgggtagaaaaaataaacggctcatcgctgagccgtttatccgtatcgagaatgcgtactctattacagaaccgctttctctacaacgcgaaccagcgtccaggacttagtcttggacagcggacggcattcgcggatttcaaccttgtcgccgataccgcattcgttgttctcgtcatgtacgtgcagtttggtcgtacgcttgatgaatttaccgtaaaccgggtgtttcaccatacgttcgatagcaacaacaatggatttctccattttgtcgctaactacgcgaccttgcagagtacggattttatcggtcattacgcacccgccttctgagtcagtaaagtcttaacgcgtgcaacatcacgacgcacttgcttcagcagatgagtctgttgcagctggccacttgcagcctgcatgcgcaggttgaactgctcacgcagcaggttcagcagctcagcgttcagctcttcaacgcttttttcacgcagctcttttgctttcattacatcaccgtcttagttacaaaggtggttttgatcggcagtttcgctgctgccaggccgaatgcttcacgggccagctcttccggtacaccgtccatttcatacaggactttacccggctgaatcaaggcaacccagtactccacgttacctttacctttacccatacgaacttccagcggcttctcggtgatcggtttgtccgggaatacacggatccagatcttaccttgacgcttaactgcacgggtcatagcacgacgtgctgcttcgatctgacgtgcagtcagacgaccacggccaacagctttcagaccgaaagtgccgaagctaacatccgtaccctgcgccagaccacggttgcggcctttgtgcactttacggaattttgtacgctttggttgtaacatcagcgacgctccttatttacggcctttacgctgctgctttttaggttgagcagccggttccggttgttcaacagcagccataccacccaggatctcacctttgaagatccataccttaacgccgattacaccgtaagtggtgtgcgcttcagaggtgttgtagtcgatgtcagcacgcagagtgtgcagcggtacgcgaccttcacggtaccattcggtacgtgcgatttccgcgccgcccagacggccgctaacttcaactttgatacctttagcgcccagacgcattgcgttctgtacagcacgcttcatcgcacgacggaacataacgcgacgttccagctgagaagtgatgctgtcagcaaccagttttgcgtccagttcaggtttacgaacttcggcgatattgatctgtgcaggtacgccagcgatatccgctacgaccttgcgcagtttttctacgtcttcgcctttcttaccgataacgatacccgggcgagcggtgtgaatggtcacacggatgctcttagccggacgctcgataacgatgcgagatacagacgctttagccagttctttagtcaggaactgacgtactttaaaatcgctgtccaggttgtcagcgaattctttggtgttcgcgaaccaggtagagttccatggtttgacaatacccaggcgaataccattaggatgtactttctgacccattgctagtctccagagtctcagcgatcggacacaaccacagtgatgtggctggtgcgcttcaggatgcgatctgcacgacctttagcacgcggcataatgcgcttcatgctcgggccttcgtctacgaaaattttcgcaactttcagatcatcaatgtcagcgccatcgttgtgttcagcgttagcaatggcagattccagtaccttcttgaccagtacagcagcttttttgttggtgtaggtcagaatatccagggcctgcgacactttcttaccgcgaatcaggtcagctacaaggcgaaccttctgagcagaagaacgagcatggcgatgttgagctaaagtttccatctcttcctcctaccttatttcttcttcgcttttttatcagcagcgtggccgcgataagtacgagtcggtgcgaattcacccagtttgtgaccgaccatttcgtcggaaacaaatactggaacgtgctgacgaccattatggacagcgatggtcaaaccgatcatgttaggaaagatcgttgaacgacgggaccaagtgcgcaggggcttcttgtctccgctttccaccgctttctctaccttcttcagcaagtgcaggtcaataaaaggacctttcttgagagaacgtggcatggcttatcctctaaaattatttgctacggcgacgtacgatgaatttatcagtacgcttgttgctgcgggtcttcttacctttggtctgcaggccccacggggataccgggtgcttaccaaagttacgaccttcaccaccaccatgtgggtggtctactgggttcatcgcagtaccgcgaacggtaggacgaacaccacgccagcgtgcagcacctgctttacccagaacgcgcagcatatgctcagcattgccaacttcgcccagagtcgcgcggcagtctgcttcgactttacgcatttcaccagaacgcagacgcagggtgacataagcaccgtcacgagcaacgatctgaacgtaagtaccagcggaacgagccagctgaccgcctttacctggtttcatttctacgttatgaacggtagaaccaaccgggatattgcgcatcggcagggtgttgcctgctttgattgcagcatcaacgccagactgaatctggtcgccagctttcaggcctttcggggccaggatgtaacggcgctcgccgtctttgtacagaaccagcgcgatgttcgcggagcggttcggatcgtactcaagacgttcaacaactgccgggataccatctttgttgcgtttgaagtcaacaatacggtaagcctgcttgtggccaccaccgatatgacgggtggtgatacggccattgttgttacgaccaccggatttgctgtttttttccagcaacggagcaaaaggtttgcccttgtgcagctctgggttaaccactttaacgacgtggcgacgacccggagatgtcggtttacatttaacaactgccattgtattactcctccgacttactcagcgccgccaacgaagtccagattctggccttctttcagggtgacgtaagcttttttccagtcgctacgacgaccgatacgctgtccgtgacgtttaactttccctttaacaaccagggtgttaacgacttcgacttcgacttcaaacagtttctgcacagcagctttgatttctgctttggtcgcgtctttagcaactttgagaacgatggtgtttgttttttccatcgcagtagacgctttttcagaaacgtgcggtgcgcgcagcaccttcagcagacgttcttcacgaatcatgccagcatctcctcaacttgcttaacagcatcagcagtcattacgactttgtcgaaggcgatcaggctaaccgggtcgataccgttcgcatcacgtacgtcaaccttatgcaggttacgtgcggccaggaacaggttctcgtccagctcaccggtgatgatcagcacatcttccagagccatgtctttcagtttctgtgccagcagcttagttttcggcgcttcaacagagaacttctcgacaacgatcagacgatcctgacgtaccagttcggacagaatgcttttcagcgcgccgcggtacatcttcttgttaactttttgactgtggtcctgcggacgagcagcgaaggtcacgccaccggaacgccagatcgggctcttgatagaaccagaacgcgcacggccggtacctttctggcgccacggttttttaccggagccagtgatttcagcacgagtcttctgagcacgagtgccctgacgcgcaccggctgcataagcaacaacaacctggtgaaccagcgcttcgttgaaatcacgaccgaaggtagtttcggaaacagtcagcgcgctctgcgcgtctttcaatactaattccattgctatctcctcacgccttcacagctggtttaacgatcaggtcgctaccggtcgcacccgggacagcacctttaaccagcagcaggttgcgctcagcgtcaacacgtactacgtccaggctctgaacggttacacgctcattacccagctgacctgccattttcttgcctttgaacactttgcccggagtctggttctgaccgatagaacccggaacgcggtgggacaaggagttaccgtgagtagcgtcctgggtacggaagttccagcgcttaacggtaccagcaaaacctttacctttagaggtaccggttacgtcaacttttttaacgtcagcaaacagttcaacgctaatgttctgacctacggtgaattcttcgccgtcagccagacggaattcccacagaccacggccagcttcaacgccagctttagcgaagtgacccgcttccggcttggttacacggttagcttttttagcaccggtggtaacctggattgcgcggtagccatcgttagccaggtctttaacctgagtaacacggtttgcttcaacttcgattacggttactgggatagaaacgccatcttcagtgaagatgcgggtcatgcccacttttttaccgactaaaccaatcattgtttcaacctctcaatcgctcgatgacctgattaacccaggctgatctgcacgtctacaccggcagccagatccagacgcatcagagcatcaacggttttttcagttggctcaacgatgtcaaccagacgcttgtgagtgcgaatttcgtactggtcacgcgcgtctttgttgacgtgcggggagatcagaacggtaaagcgctctttgcgggtcggcagcgggatcggaccacggacttgcgcaccagtgcgcttagcagtctcgacgatttccgcggttgattgatcgatcagacgatgatcaaacgctttcaggcggatacggattctttggttctgcatgagaccagagctccaattattttatagacgaaatgattactcctcatacccattacgattgatgggagagtgtaaccgttcttacatagtcccccgattggggacattgtttgataacccaaatgcgattaccagggttcatattgaaccggccgtcaactttgacaggcccgcgcattatacgcaaattctggcgcgacgcaagtgctgtttagaaaatcatcaccaggatttgcgcgccttcgcgttagcgcgctgtacggggatgcaatgcggagtaagagcgcggattgtgggatccattcccggaaaatgccttttgtgctgaacgggagaggatgagcatagtgacgcaatgttcatcgatcattgcggggtcaactatgctcgccgccctccccttcttgctgtgctatagcggtttgaccgtggcattatgccaccaggatctgcgccacggtctgttgcccgaccgttacacctgtcccctgctgtggagtggtttacttttttatctctgtctggcgccgcaccagctgcatgatgccgtctggggggcgatagggggctatctctctttggctgcgatttactggctataccgcggtatccgcggctatgaagggttgggttatggagatataaaatatcttgccgccctcggcgcctggcatggctggcgattgctgccgcagttggtcctggttgcctcgctactcgccggcatagcgtgggcaggagcaggtttatacgccagttgcggcaggaagagcaaatggggaagaagcaacccgctgccgtttgggccattcctggcggccgcgggtttttggtgcgggtggcagacgctggctagtctgacactttgatctgcgactgcaggtaattttgcagaccgattttgccaatcaaatcgagttcggtttccagccagtcgatgtggccttcttcatccgccaggatctcaatcatcatatcgcggctgacgtagtcatggacgctgtcggcataggcaatagcctcacgcaaattttgcgccccttccagctccagcctcaaatcggaccgcagcatctcttccacatcttcaccgatgccaagtttgccgagatcctgcagattagggataccttcgagaaaaagaatacgctcgatatacttatcggcgtgcttcatttcgtcgatggattcgtggtactcaatatcgttgaggcgcatcaggccccaatttttaaacattctcgcatgaagaaagtactgattaattgcgactagctcatttcccaataatttattgagataacttatgattttgacatcacctttcattatatagtccctccgcttccactcattgaagcgtagtccggcctatagggatgtcaaaagagaagcgtggacttcaggcgatttctttgaattccggcatggtggttaattcatcttccatcacttcacgcgcggcacgaacacacttaccgcattgatttcccacgggaacaaacttacgtaattgctgaaaagattgcggttgaaactggcgcacaacctgacgaatttttttatcgctgacgccattgcacaaacaaacgtacatagaaactcccgttcaatttatgcacaaatattaaatgagaatggttatgattacaatagaccatttgctcattatccgccgcaacgcacgatatgaatagccagcaataatccgtttttcgctgaatgacagacagcaaaaagggcgccgaagcgccctttttaattcaaagctaacgaattagcccagaactttagctacaacgcccgcgccaacggtacggccgccttcacggattgcgaaacgcagaccgtcgtccatcgcgatcgggtggatcagggtaacaaccattttgatgttgtcgcccggcattaccatctctacgccttccggcagttcgatggtgccagtcacgtcagtagtacggaagtagaactgcggacggtagcctttgaagaacggagtgtgacggccgccttcatctttggacaggatgtacacttcagattcgaacttggtgtgcgggttgatggtgcccggcttagccagtacctgaccacgttcgatttcttcacgtttgataccacgcagcagaacacctacgttctcaccagcacggccttcgtccagcagtttgcggaacatttcaacgccagtacaggtggttttcgcggtttctttgataccaacgatttcaacttcttcacctactttgatgataccgcgctctacacgaccggtaacaacggtaccacgaccggagatggagaatacgtcttcgatcggcagcaggaacggcttgtcaatcgcacgctctggttccgggatataggtatccaggtggccagccagttcgatgattttcgcttcccactctgcgtcgccttccagcgctttcagagcagaaccacgaacgatcggagtgtcgtcgcccgggaaatcgtactgagacagcagttcacgaacttccatctcaaccagttccagcagctcttcgtcatcaaccatgtcgcatttgttcaggaacacgatgatgtacggaacgcctacctgacgacccagcaggatgtgctcacgagtctgcggcatcgggccgtcagtcgcagcaacaaccaggatcgcgccgtccatctgcgcagcaccggtgatcatgtttttaacatagtcggcgtggcccgggcagtctacgtgcgcgtagtggcgagtcggggtgtcatattcaacgtgagaggtgttgatggtgataccacgagctttttcttccggcgcgttatcgatctggtcgaatgcgcgagcggaaccaccgtaggttttagccagaacggtagtgatggcagcagtcagggtagttttaccatggtcaacgtggccgatagtaccaacgttgacgtgcggttttgtacgttcaaatttttctttagacacggctatattccttactatagtgctctccccttcggagagagcacgggacttaggttttaatcctgtggattatttaccacgggcttcaataacggcctgagcaacgttgttcggcgcatcatcatacttcaggaattccatggtgtatgatgcacgacctttggtcagagaacgcagctgagttgcataaccgaacatttcggacagcggtacttcagcgtggatcttaacgccggttacttcggattcctgaccgcgcagcataccgcgacgacggctcaagtcaccgataacgtcaccagtgttctcttccggagtttctacttcaaccttcatgatcggctcaagcagaactggttttgctttcttaaagccttctttaaaggcaatagacgcagccagtttaaacgccagctcagaggagtcaacgtcgtggtaagaaccgaagtgcagacggatacccatatcaactaccgggtaacctgccagcggaccagctttcagctgttcctggatgcctttatcaacggccgggatgtattcgccaggaattacaccacctttgatgtcgttgatgaactcgtaacctttcgggttagagcccggctccagcgggtacatgtcgatcacaacgtgaccgtactgaccacgaccaccagactgcttggcgtgtttaccttcgatatcggtaactttcgcgcgaatcgcttcacggtaagcaacctgaggtttaccgacgttcgcttcaacgttgaattcacgcttcatacggtcaacgatgatgtcgaggtgcagctcacccataccggcgataatggtctggttagactcttcgtcagtccatacgcggaaagacgggtcttctttagccagacgacccagagccagacccattttttcctggtcagctttggttttcggctcaacggcgatggagattaccggctcagggaattccatacgctccagaatgatcggcgcatccgggtcacacagggtgtcaccagtggttacgtctttcagaccgatagcagcagcgatgtcgcccgcgcgaacttctttgatctcttcacgtttgttagcgtgcatctgaacgatacgaccgaaacgctcacgtgcagctttcacggagttcagtacggtatcaccagagttaaccacaccggagtacacgcggaagaaggtcaggttacccacgaacgggtcggtagcgattttgaacgccagtgcagagaacggctcgtcgtcgcttgcgtgacgctcagccggggtatctttaccgtcgtccaggataccgttgatcgcaggtacgtcaaccggggatggcaggtaatcaattaccgcatccagcatcgcctgaacgcctttgttcttgaacgcagaaccacaggttaccaggatgatttcgttgttcagaacgcgctgacgcagagcttttttgatctcttcttcagtcagttcttcaccacccaggtatttttccatcagctcttcagaagcttcagctgcggattcgatcaggttctggtgccattcatcagccaggtcctgcatgtcagccgggatatcttcgtattcgaaggttacgccctggtctgcatcgttccagttgatggctttcattttcaccaggtcaacaacgccggtgaaaccttcttcagcaccaattgccagctgcagcggaaccgggttcgcgcccagacgggttttgatctgaccaacaactttcaggaagttagcgcccatgcggtccattttgttaacgaacgcgatgcgcggaactttatatttgtttgcctgacgccatacggtttcagactgcggctgaacaccaccaactgcgcagtaaaccattaccgcaccatcaagaacacgcatggaacgttctacttcgatagtgaagtcaacgtgccccggggtgtcgatgatgtttacacggtgcggttcatactgtttagccataccagaccagaatgcagtagtcgcagcggaagtgatggtgataccacgttcctgctcctgctccatccagtccatggtagcggcgccgtcatgaacttcaccgattttgtggtttacaccggtgtagaacagaatacgttcggtagtagtggttttaccggcgtcgatgtgcgcactgataccgatgttacggtagcgtgcgatgggtgttgtacgagccatttgattcctcgtttatttctttaggcgttcagttaagttatccagagcgggcgactcatctgaaacgcccgcctggtgactatgactccgaagggattaccaacggtagtgtgcgaacgccttgttggcttcggccatacggtgaacgtcttcacgtttcttaactgcagtacctttgttgtctgcagcgtcagtgagttcgttcgccaggcgcagagccatggatttatcaccgcgtttacgagcagcttcaacgatccaacgcattgccagggcattacgacgaaccggacgtacttcaactggaacctgataagtagaaccacctacgcggcgggacttaacttcgacagtcgggcgcacgttttcgagcgcaacttcgaaggcttccagttcagttttaccagagcgctgagccagggtctccagcgcgctgtatacgatagtttctgcagtagattttttaccatctaccatcaggatatttacaaatttagccagcagttctgatccgaacttcggatccggcagaattttacgctgaccaatgacgcgacgacgtggcatggaaatactccgttgttaattcaggattgtccaaaactcaaagagtttagtttgacattaatataaaacgtttggccttacttaacggagaaccattaagccttaggacgcttcacgccgtacttggagcgagcctgcttacggtctttaacgccggagcagtcaagcgcaccacgaacggtgtggtaacgaacacccggaaggtctttaacacgaccgccacggatcaggatcacggagtgctcctgcaggttgtgaccttcaccaccgatgtaggaggtgacttcgaaaccgttagtcagacgcacacggcaaactttacgcagtgcggagttcggtttcttaggagtggtggtatatacgcgagtacatacgccacgtttctgcgggcaggcttccagcgctggcacgttgctctttgcaactttgcgcgcgcgtggtttgcgtaccagctggttaattgttgccattaaatagctcctggttttagcttttgcttcgtaaacacgtaataaatcgcctcatatattatgaggacgcagaattttagggcggtgccgaaaaggtgtcaagaaatatacaacgatcccgccatcaccaggccaactgaccggcatgtttgactgtgagtctgacgaaatcagtatagctaaccctgccgacactgtccgcaatttgaccagccagcccgcgggcgtcaacgtcgtcttgcagcacgtatagggttatgggggcggattgcaggatctcaaggaagcgaccatcggcgatggccgcggtgacgccgtcagacagtagtaccagatcgtcgccgtgctccatcaaacgaagcatcgctgcgatgtcggcatgccagggggaaacactgagcgtatggagcatgggggcctcagaaacgcaaaatcacatcaaattcatgcagacgggcgcgcagggcatccggcgccaggcattcgacatccaccacccacggggtcgcgggatccaggccgcgctctcgcgctgagtcggcgcacagccagcactggtcgatatcatatagcgacagcaatttaaaggtagcgatgtagtcgcgggccagcacagcgccaggccgctgttcgggtaacagctgaaacacgccgtcgcccacaaaaaacacgccaatatcgtcggtgagcgcggaggttgctaataaggcatcgaggccttccctgccggcggcgctgccgtgcggcgcagaggaaaatacaaaagccacacgtttcatcagaactgcaccatccgatcgcaagtaagcgccgcttccgctagcgcgccgagcccgctcaaggtaaaacccggctgcaaattgtggccaggcagagcgagctgttgcgcttcgcgttcgtccgttacgccacgacgcagggcggccgccacgcagatatgcagcgcgacgccgtgctcatcgtggagggattgccacccgcgcaccagatcgaactcatcgctggcgggcgccgtcaactggttagcgttaagcacgccttcgcgatagaaaaaaacgcacgccagctcatggccttcctgcagcacggcctgggcaaattgccaggcgctgctcgcctgctgcgtgccataggctgggccggtcaccgtgagggcaaaacgcattacttatccagcccctggaaatcgccgcttttgaactggcgaatatagaggtagacggtgtgcttggagatgttcagacgatcggctacctggttaatagcgtctttaatatcgaagatccctttctcgtagagattcagcacgatttgacggtttttcgcattgttagacacgctgcgatcggcattcacctcttcaatggtgaactccagcgtctgggcgaccagatcgtctaccgaagaagcaaagttcaccggcgagttcacttcaggcgtttctggcggaataaaggtgctcatgatctgggaaaacggcacatccagattcatgttgatacacagcagaccaatcacccggtgatcgcggttgcgaatggcaatcgtcaccgacttcatcagtacgccgcttttagctcgggtaaagtagcatttggaaacgctgctatcggcgcccgtcatatcgtgcagcatgcgcagcgcaagatcggtaatcggtgaaccgatttggcggccggtatgttcaccattggcgatacggatggcagagcatttcagatcctgcaaagaatgcagcacgatttcacagtgcgaaccgatgagcatcgccaacccgtccactaccgcttcataagatttgagaatatcgaaatcggtctggtcaaagggacgttgatccagcaggtcaagctcgctggtttcattggttaaaagcgacctggacatgaaaaaaagcactccttttcaggagcctgtcgttattgtcagggcaggctcatcatcattattaagctatctaaagtaatacagcgcctgaggatctttccagttttaattatatctgcgctcaataaaaaagccgccgcctctgacgagacggcggcctgaacctgattacttcttagcgtcagctttcgcgtccgcggctttcgcatcgcctgcggcttccggctgtgcatctgccttcggcgccggtttgatatccagcagttctacatcaaagaccagcgtagagttggccgggatgcccgggacgccagttttaccgtaggccaggtccggcggaataaccagcttgattttgccgcctttcttgatgttcttcaggccttcagtccagcccgggatcacgccgtcgagacggaaagagagcggctcgccgcgagtataagagttatcaaactctttaccgtcgatcagggtacctttgtagtttaccaccacggtatcgctgtctttcggcgcatcgccagcgccttctttctcgactttatacagcaggccagtttttgaggttttcacgcccttctctttggcaaagttgtcacggaaagctttgcctttggcttcgttctcagtggcgtctttttccattttctgctgagccgcggtcttcacgcgcgtttcaaaggcctgcagagtctgttcgatctcctggtcggacagtttgctcttatcggcaaacgcgtcctgtacgccggcgatcagctgggctttatccagcttaatgcccagcttctcttgttctttcagggagttttccatgtaacgccccagggacgcgcccagcgcataggccgatttctgatcgtcatttttaaatgccgatttactctcagccgccggggctgccttcgttgccgtatctgcagcgaaggtcagcggtgcattcagggcgacggccattgtggccgtcagcagcgttactttaaacagtgatttcatccatttctccagggccggggcctctcgccccagggttatcgtaaaaagcaaaaaacgtactatagaacgttgccgttaaaatctacatacggacgttcctgaatatcgcctcttttaggactatttttgtatgaataagtttcctgtacggcgcagcgatgctgcgcgccaggggaaacttaagtagaatccgcccgcaggatcagactaaagaggttacccatgcacgatagcacattagaaacgcgccttgcggagctggaaagccggctggcgtttcaggaaatcaccatcgaagacctcaacaaaaccgtgaccgcccacgagatcgagatggcgaagatgcgggagcatatgcgtctgatgatcgagaagctgaaggcgacccaaccctcccatatcgcctcccaggcggaagagacgccaccgccgcactattgaggcgtaaaaaaagcgggtttccccgcttttttgtcgtcttcgtgccgaagcgcaaagattagtggcagccgcagccaccgtggccgccgcagccgcctttaccatggtcgtgaccatgatcgtggccgtggccgccgcagcaaccgtcatgaccatggtcatgatcgtgatcgtggccatgcgcgccgtgcacgtgaccgtgctccagctcttccgcagtcgcttcgcggatggcgacgacttccacattaaacttcaggttctggccagccagcatgtggttgccatcaaccacaacgtggtcgtcttcaacttcagtgatttctactggtaccggaccctgatcggtttccgccaggaagcgcatgccaacctgcagttcatcaacgcccatgaagacgtctttcggtacacgctgcaccaggttttcgtcatactgaccgtaagcgtcgttagcgccgacggcaacgtcaaatttgtcgcccacttcgtggccatccagcgcgttttccaggccggaaatcagggagccgtgaccgtgcaggtaatccagcggcgcgcttaccggagactcatcaaccaacacaccgtcttctgtacgtacctgataggccaggctgaccaccaggtcttttgctactttcatgatatctcctgagatgggaagaatagtggcgcagattgtagcggaattctgctgccgtgtaccctttagcttaaaaaaagccgacggataacgctagtcgggatgaaaaatgccaatcacctgctcctctttgcgtacatgctcacgggcctctttatctgcctcacgcatctgatgaccgcacttaacgcactcaacaacatcgacattattctcacgccacattgccagcgaatcctgcgcctggcacgccggacatttcgccccggcaataaaacgtttacgcactgccataagatttacctttattcaaactcgtcccagccgtccagctgccggctctctttctgcatttcgcgctggaaaatctcttccagttcgcgccgggcctcccgcacgcgtgatatctgtaccgtatcagtatgcactggcattagctcgcgcagcattcgcatatcgaggcgtcggaagtgcagctgcgcgcgctgggcctggtgaggatgcatcccgagggtgatgagcgctttgcgccccagctccaacgcactggagaaagtttcacgagaaaactgcgtcacgccggcctgcagcagctcatgcgcctcaacgcgcccgcgagcgcgggccagaatatgcagatgtggaaagtgttgttgacacatttccaccagccgcatggtatcttctggctcattacaggtgatgacgatcgactgcgcctcttccgctcccgccgagcgcagcagctccagctgggtggcatcgccaaaatagactttatagccatagttgcgcatcagatttaccgcgctgatgtcccgctccagtaccgtaatacgcatcttattggccatcagcaggcgaccaatgacctgaccaaagcgaccaaacccgacaataatcacctgtggcttgtcatcttccacccacggcgcctcaccggtatcgtccgccgggttcagccgtcgcgacaatagcttatctatccccttcatcagcagcggcgtcgtcatcatcgacaacgttaccgccaccagcagcagcgccatctggtcgtgcagaaacaaccgctgagaggcgggcagcgaaaagaggacaaacgcgaactcgccgccctggcttaatacgcccgcgaactgcatccgctcggaacttcgcaggccatagagacgggccagcagatagagcaccagcatttttaccgccaccagcaccgccacgctcaccgccacccacagcagatgggtatacagtacgccaaggttcagcgccatgccgacggaaataaagaacaacccgagcagcagccccttgaacggatcgatagcgatctccagttcgtggcgatactcactttccgccagcagcacgccggcaataaaggtgcccagcgccatcgacagccccagcgcctccataaacagggctgatccgaggaccaacagcagcgtggcggcagtgaacacctccctgacccccgagctggcgataaaacggaacaccggccgcagcagatagcgtccgccaatcagcatcccggcaaaggccaggaccttcatgccgaccgtcaaccagttcacatgctcatccgctgaaccggccagcaggggcaccagcgccagcgccgggatcaccgccagatcctgaaacagcagcaccgaaaagcctagctgtcccgcttcgctgcggctcattcccttctcacgcatcagctgcagcgccatggcggtggaagacatcgccaggccgatcccgccgaccaccgccgcctgccatgaaaacccggtcgtcatcagcaacccaccgaggatcgccgcgctgagcatcacctgcgccgcgccaacgccgaagatggagctccgcagtcgccatagcttggcgggattgagctccaggccgatgataaacatcagaaacactacgccgagctcagagaaatggagaatttcatccacatcgctgataaacccgagcccccacggaccaatggcgatcccggccagcagatagcccagcaccgcgccaatccccagtcttgaagccagagggacggcgatgacggccgcgaacaaaaacaacacccccgccagcagcaaatcagatcccgccatggacacctccggcggcgatggggttggccaaccagtcccggtaggccagggcgcggctgcgcagctcctctggctgctgcctccgggcccagtagacgataatggggctcatccagtgcatacggcacatgccggcggtcagttcaaaaggacgtaaaatatcgttcatcggatagcgattagcatcgcgacggtaggcgctctcaggctcgccggtagtgatcacactgcgccagtactttcccgccagttcgttccctccggcgccgctggcgaagccgcggcttaacacacgatccagccactccttaagcagcgccggacagctccaggtatataaagggtgctggaaaacaatcacctcatgccggcgcagcaggtcctgttcgtaagcaatatcgataaaaaaatccggatagtgcgcgtagagatcgtgcacggtgacgttcggcaactgtaaggccggctctaataaaacccggttggccacggaatcctgagattctgggtgggcatacagcagcaacactttcgctgtctgagacatcattcccctcccgtaggtcttctggcggcctgcacagccccggcgttttgacacagccagaatgactttgtgtatcgtcttcgttttgggctaccatggcggcccggtgaagcgattcgcttccacactacattatcataatgacaaattaacatagtctgaacatacggcgccttatgattgttttctcctcgttacaaattcgtcgcggcgtacgcgtcctgctggacaacgccaccgctaccatcaatcctggccaaaaggtcggtctggtggggaaaaacggctgcgggaaatcgacgctgctatcgcttttgaaaaacgagataagcgctgacggcggcagtatgacctttcccggcaactggcagctggcctgggtgaatcaggaaaccccggcgctaccgcagccggcaatcgattatgtcattgacggcgatcgagagtatcgccagctggaggccgcgctccagcaggctaacgaacgcaacgacggtcatgctatcgccaccgtccacggtaagctggacgccatcgacgcctggacgatccgttcgcgcgccgccagcctgctgcacggtctggggttcagcaatgaacagcttgagcggccggtcagcgatttttccggcggctggcgtatgcgccttaacctcgcccaggcgctgatctgccgctccgatctgctgctgctcgatgaaccgactaaccacctcgatctcgatgcggtgatctggctggagaagtggctgaagggctatacgggaacgctgatcctcatctcccacgatcgcgattttctcgatcctatcgtcgacaaaattatccatatcgaacagcagaccatgtttgagtacaccggcaactacagttcgtttgaagtgcagcgcgccacccgcctcgctcagcagcaggcgatgtacgaaagccagcagcagcgcgtcgcgcacctgcaaagctatatcgatcgcttccgtgccaaagccaccaaggccaagcaggcgcaaagccggatcaaaatgctggagcggatggagcttatcgctccggcgcacgtggataacccgttccacttcagcttccgccagccggagagcttgcctaacccgctgctgaagatggagaaagtcagcgccggctacggcgagcgtataattctcgactccatcaagcttaacctggtgccgggctcgcgtatcggcctgctgggccgcaacggcgccgggaagtcgacgctgattaagctcctggcaggcgagctccagcccgtaagcggcgagatcggcctcgcgaaaggcatcaagctcggctacttcgcccagcatcagctggaattcctgcgcgccgatgagtcgccgctgcggcacctggcgcgtctggcgccgcaggagctggagcagaagctgcgtgattatctcggcggctttggtttccagggcgataaggtgagcgaagaaacccgccgcttctccggtggagaaaaggctcgcctggtactggccctgatcgtctggcagcgccctaacctgctgctgcttgatgaaccgaccaaccaccttgacctcgatatgcgtcaggccttaaccgaagcgctgatcgactttgaaggggcgctggtggtcgtatcgcacgatcggcacctgatccgttccaccactgacgatctgtacctcgtccacgatggtaaagtcgagccgttcgacggcgatctggaagattatcagcagtggctcagcgactcgcaaaaacaggagtcccagagcggcgaggcgccaaaagagagcggcaatagcgcccaggcgcgcaaagaccagaagcgtcgggaagcggagctgcgcagccagacccaaccgctgcgcaaagagatcgcccgtctggaaaaagagatggacaagctcaacgcgcagttggccagtgcggaagaaaaacttggcgacagtgagctttatgacgcctcacgtaaagccgagctgaccgaatgcctgcagcaacaggccagcgcgaagtccgggctggaggagtgcgagatggcctggctggaggcccaggagcagctggagcgcatgcttcaggaaggctaaactcttcctcttcatcctgcctgcgcgtacgctgccgctggcagggtgggtttctgccctcttcatggcctggccatcagcgacatcaatgatttgtttttgctgtaagctggcgtcactggccgcaagaccacatattggctaaccccctgcatgccctgcgcggtatagtcatcatcacgtttattaattgttctggtgctatggttgaaatcatccccacagacatgacgccccccgaaaacgattcgcgtgagttccatccgatgcgcggcgtgggcaatcgtcatctgcaaaccatgctgccgcggctgattcgccgtaaattgcgctttaccccgcactggcagcgccttgagctgccggacggcgattttgtcgatctggcctggagcgaagacccgcaccaggcgcgccataagccgcgcctcgtcgtttttcacggcctggaaggcagtctgcacagcccgtacgcccatggtctgatccacgcggcgatgcagcgcggctggctgggcgtggtgatgcatttccgcggctgcagcggcgaacctaaccgcaatcaccgcatctatcactccggcgaaacggaagatggcacctggtttttgcactggctgaagcgcgagtttggtcccgcgccgaccgcggccgtcggctattcgctgggcggcaatatgctgggctgcctgctggcagaggaaggcgaccgctgcccgctggatgcggcggtgatcgtctccgcgcctttcatgctcgaagcctgcagctatcatatggataagggcttctcgcgagtttatcagcgctatctgctcaatctgttaaaagccaacgcttcacgcaagctgaaagcgtacccgggctcgctgcccgtcgatttacgccagctcaaagggatgcgccgcatccgggaatttgacgatatgatcaccgccaaaatccatggctttgccgatgcgctggattattaccggcaatgcagcgccatgccgcggctcagcgatatcactaagccgacgctcatcattcacgcgaaagacgatccgtttatggatcaccactcgattccgccgcaggagcaactgcccgcgaacgtagagtatcaattgaccgagcaaggcggccacgttggctttgtcagcggcactctgcgtaaaccggagatgtggctggaaagacgcattcccgactggttaaaccgctggctggaggttcccgtatgattattccctggcaggatctggatcccgaaacgctggataacctgattgaaagctttgtgttacgtgaaggcaccgattatggtgaatatgaacgttcacttgccgataaagtcgccgatgtaaaacagcagctgaaacgcggagaggcggtccttgtgtggtcggaactgcatgagacggtcaatattatgccgcgcgcgctgtttaacggctaaggcgacgccactacatcgtttaaccagggagttgttatgtctgccaaacatccggtgatcgccgtcacgggctccagcggcgcgggcactaccaccaccagccttgcctttcgcaaaatcttcgcgcagctaaacctgcacgccgcggaggtggaaggcgatagctttcatcgctacacccgcccggaaatggacatggcgatccgtaaggcgcgggatcagggtaaacatatcagctactttggcccggaggcgaacgacttcggcctgctggagcagacctttgtcgactatggtcgccacggcaaaggtcagtcgcggaaatatctccacacctatgacgaagccgtgccgtggaatcaggtgccggggacctttaccccctggcagccgctgccggagccgacagacgtgctgttctatgaggggctgcacggcggggttgtcacgccgcagcatgatgtcgccagccatgtcgacctgctggtcggggtggtgcctatcgttaacctcgagtggatccaaaagcttattcgcgacaccagcgaacgcggccactcccgggaggcggtgatggactcggtcgtccgctcgatggaagattacatcaacttcattaccccgcaattttcccgcacccatatcaactttcagcgcgtgccgacggtggacacctccaacccgtttgccgccaaagcgatcccctcgctggacgagagctttgtagtgatccatttccgcaatctgcagaatatcgatttcccctggctgttggcgatgctgcagggctcgtttatctcgcacatgaacaccctggtggtgccgggcggtaaaatggggctggcgatggagcttatcatgacgccgctggtcgagcgcctgatggaaggccgtaagataggctaaccaaaaaaccccggcctggccggggttgagattcgatacaacggcaggcgaagactacgcctcgatcacttcataggagtgagtgatgttcaccgctttttccagcatcagcgccaccgagcagtatttctctgccgacaggtccaccgcccgggagaccgcggcatctttcagcgccttgccggtgacgataaaatgcagattaatatgcgtgaacagacgcggagcctcttcgcgacgctcggaggtcagcttcacttcgcaattggtcacgtcgtgacgacctttttgcagaatggagaccacatcgatcgcactgcaaccgcccgccgccatcagcaccatctccatcgggctgggagccttatccccggagttgccatccatcagaatctggtgtcccgatgcggactccccgataaaggttaacccttctacccatttcacacgcgcttgcataaaatttaactccagtatcgcaatattcctgtcagattacgcgcacataacaattctcgcaacggaaggcgacctgcgtcatgctgaagcgagacaccaggagacatgcggcgaaagctatgctaaaacagtctggatgctacagtaatacattgatgtactgcatgtatgcagaggagttcacattacgggctgtcgaaaaatcatcagccagcttcccaggtatagggaaacaatacgattgcatgcccggacgccgtgtagtgtcggcgcccggagatagcttataacagaggataaccgcgcatggtgcttggcaaaccgcaaacagaccctacccttgaatggttcttgtctcattgccacattcataagtacccatcaaagagcacgctgatccaccagggtgaaaaagcagaaacgctgtactacatcgttaaaggctccgtggctgtactcatcaaggatgaagaaggtaaagagatgatcctctcttacctcaaccagggcgatttcatcggtgaattaggcctgtttgaagagggtcaggagcgtagcgcctgggtacgggcgaaaaccgcatgtgaagtggccgaaatctcttataagaaattccgtcagctgatccaggtgaacccggacattctgatgcgtctctcttcgcaaatggctcgccgtctgcaggtcacgtctgagaaagtgggcaacctggccttcctcgacgtgacgggccgtatcgcccagacgctgctgaacctggcgaagcaaccggatgccatgacccacccggacggtatgcaaattaaaattacccgccaggaaattggtcagatcgtcggctgctctcgtgaaaccgttggtcgtattttgaaaatgctggaagatcagaacctgatttccgcgcacggtaaaaccatcgtcgtctacggcacccgttaagttgctaagcggcgtattgctcccgcagtacgccgtttttgtttttccctcatgtggcgcaggctgatttaccacccggaagtcaactatgcactgcggcaaacgctggtgctgtgtctgcccgtggccatcggtcttctgctcggccatctccagcaggggctgttattttccttagtccccgcctgctgcaacattgccggtcttgataccccgcataagcgctttttcaaacgcctgattatcggcggctgcctgtttgccggatgcagtctggtggtgcagttgctgcttgcccaggcgatacccctgccgtttattctcagcggcctggcgctcttgctcggcgttaccgcggagatcagttcgctgcacgcgcggctgctgcccgcgtcgctgatcgccgccatctttaccctgagcctggcgggcaatatgcccatctgggagccgctgctgatctacgccttcggcacgctgtggtacggcgtgtttaactggttctggttctggctgtggcgcgaacagccgctacgggagtcgcttagcctgctttaccgggagctggcggactactgtgaagccaaatacagcctgctgacccagcataccgatccctcgaccgccctgccgccgctgctcacccgccagcagaaagtggtcgatctgattacccagtgctatcagcagatgcatatgctggccgctaaccaacgcaacgatcataagcgcctgctgcgggcgtttcagatggggctggatctacaggagcatatttcggtcagcctgcatcagccggaagaggtgcaaaagctggtggaacgcagccatgccgaagcggtgatccgctggaacgcgcagaccgtcgccgcccgcctgcgcgtgctggcggatgacatgctctatcatcgctttccaaagcgctttcagatggataaacagatcgaggctctggaaaagatcgccagacaacatccggataacccggtcggccacttctgcgcctggcacttcagccgcatcgcccgggtgctgcatacccagcgcccgctgtatgcccgggacctgatggccgacaaagagcgtcgtttaccgctatttcccgcgctaaagaactacctgtcgctaaaatctcccgcgctgcgcaatgccgcccgcatcagcgtgatgctgagcgtcgccagcctgatgggcaacgccctgcacttgcctaagccctactggatcctgatgacggtgcttttcgtcacccagaacggctatggcgccacccgggtgcgtattgttcaccgggcggcgggaacgctcgccggcctgacgatcgccgggcttaccttgcattttcacgttccggagagctacaccctgagcgggatgctgctgattaccctgctcagctatctgatcattcgcaaacactatggctgggcgatggtaggctttacggtgacggcggtgtataccctgcagctgctgacgctcaacggggaacagtttattatcgcccggctgatcgacacccttatcggctgcctgatcgccttcggcgggatggtctggctgtggccgcagtggcagagcggcctgctgaaaaaaaatgcccacgatgcgctggaggccgaccagcaggcgattcgcctgatcctcagcgccgatccaaaagcccccgcgctggcctatcaacgcatgcgcgtcaaccaggcgcacaacgcgctctacaactccctgaatcaggcgatgcaggaacccgggtttaatacccactatctggaagatatgaagctgtgggtaacgcacagccagtttatcgtcgaacacatcaacgctatgaccaccctggcccgggagcatacgatgctgaccccggatcttgcccagcgctatctcgaatcctgtgagattgcgctgcagcgctgccagcagcggctggacagcgatggtcccggcagcgcaggggatgccaatattatggagtcgccggaaagcgaggcgccgatcggtccgttaagcaccctggagcagcatctgcaacgcattctgggccatctgaacaccatgcacaccatttcgtcagtggcatggcgtcagcggccgcaccatggcatctggctgcggaagatcaaccgttaatcacctttgccaccgcctgggcaaagcgcgccatcccctcggcaatatcctgctcgtcgatgatcagcgagggaacaaaacgcatcacgtccggcccggcgttgagcaccatgacgccggcgtcggccgcggcatagaggaaatcacgcgcgcggcctttgtgctgcggcttgagttccgcgccgatcagcaggcccatcccgcgtatatcactgaacagatcaaactcggcatccagccgctgcaggtgtttgacgaacagttcgcgcttcgcgctcacgccatccagcaccgccggggtattgataagatcgaaggcggcgttggcgaccgcgcaggccagcgggttgccgccgtaggttgagccatgggagcccgcatggaaggcgctggcgatctcgtgggtggtcagcatggcgctgaccgggaagccgccgcccagcgctttggcgctggtcagaatatccggggtcacgccgtagtgcatataggcgaacagcgatccggtacgccccataccacactgtacttcatcaaagacgagcagcgcctggtgctgatcgcacagctcgcgcagtccctgcaggaaagccggcgtggccgccgtcacgccgccttcgccctgaatcggctccaccaccaccgcgcaggtgtggtcatccatcaccgcttttaccgcctgcagatcgttgaagggaacatggacaatatccgccggttttgggccgaaaccatcggaatacttcggctgaccgccgacggaaacggtaaacagggagcggccatgaaaggcattatggaaggcgatgattttggttttatacgggctatggcgggtcaccgcatagtgacgcgccagcttaaaggccgtttcattggcttcggtgccggagttcataaacaccacgcgctcggcgaaggtagcctcgacaagtttacgtcccagacgcagcgccggctcattggtaaagacgttgctggtgtgccacagcgtttcgccctgctgatgcagcgccgccaccagcgccggatggcaatggccaagcgccgtcaccgcgataccgccggcgaaatcgatatactctttcccctgctgatcccagacgcggctgcctttccccttcaccgggatgaattctgccggtgcataaattggcaaaataacttcatcgaatgtggcgcgggtgattgccggttgttcagttgccatgtcttgcccatccctcttcgttacgcagatgcgattatgataatctaatcacaaaatatgcataaaaaatcagtcaatagcaactgaaaatcaccgtttcaaaaagttggccagcaattgatggccctgctcgctgaggatgctttccggatgaaactgcacgccctcgagatcccattcgcggtgacggatccccataatctcaccgctggcgctgcgggcagtgacgttaaactcggacgggagcgtcggcgggtcaatcaccagcgagtgatagcgggtcaccgtcaggggattattcagcccctgaaacaccccttcgccgttatgctcgataagcgaggttttgccatgcatcacctgggccgcccgcacgatagtcgcgccaaacgcctgggcgatcgcctgatgcccgagacagacgcccagcagcggcgtttttccggcatagtggcggataaccgcgagggaaatccccgcctcatccggcgtgcaggggcctggcgagatcacgattttctccggcgccagcgccgctatctcctccagcgtcaacgcatcgttgcgcctgaccagtacttccgcccccagttcgcagaagtactgatacagattccaggtgaaagagtcatagttatcgataagcaggatcatagcggctccggaacaatcaaaaccgggctattctactcagattcccgcgcttcgcttaccactttgcgaaagatcgccaccagcggggccagatcgcccatcgcgctctgctggcaggccgcactccagccggcggggtcaacgtcacgccagttaagaaggtagccggcatgtatcgccagctgttcaaagaaaatacgctgggtcaggccattgccaagacgaaaagggtgcagcacattaatttcaccatagaaccagctcaggcgttcgatgaaggtatcgcgcggcaggccattgagataatcctcctgctcaagggcctgcatcagggcattcccctcctcctcgatccgggcaaagtggcagaacggcgtatcgcccaggtagaggttcacttcacgcaagcggcccgcccagtcaaacagatcctgatacaactgatgatgaatagcgcacagatagggtaagccgcgcacccgcgggcccagcggcagagtggccgcccgcagcgctgtcatctcaaaggcggcctgctgcagatttttagcctggcggatgccgagacggttgcgcagcacgttcagcgccggatagagataaggatcgcgttcatcgccgaatttatcgctcatactccctccgcaacgtcgccagacgcgccagcgcctcttcggcagtcagcgtaaccagcggcaccgtcacgccttcaaggcgacggctggcctgaaaattggtattgcgtgtctgttcccagagtcgggatttttgcttatcggtgagtggacgcatcgtcgccccccatatcgtcccctgtgtgccacaagtataagcagcaatttcaggttatgccgggaggcgaccgggcgcggcgatagaccaccgcgccgcgggaggattagggcagcactttcgcagagaggataacgaccggtttggtcggcacattctgatacggaccaacgttatgggtctggacctgggagatcttatccgcaacatccatccccttcaccactttgccgaataccgcatagccaaagtcgcgctggccatggtcgaggaaggcgttatccgccacgttgatgaagaactgactggtggcgctatcctgatcggcggtacgcgccatcgcgatggtgccgcgggtgttgcgcaggccgttgtctgcttcattcttgatcggcgggttaggctgcttctgctgcatctgttcgttaaagccgccgccctgcaccatgaatcccgggatcacgcggtgaaaggtggtgttgttgtagaagccgctgttgacgtacttcaggaagttatccacggaaatcggggctttctggctgtttaactcaagctcaatgttacctgccgaagtggtcagcagcacatgcggatcgccctttgccgccatggccggggagaacgctgaaatagcgaaaacggcagccatcgccgccagtgttgatttgagcatggaaattccttaacggagcagaataaaagcgagtgccttgattctaaagagcctttgcatcctgggccagccttttaccaaattttacttagctgtaataattgtaaccgcgcaaacgatctcctttgcagcgaacaagcgtgatgcagatcacattaaaacatgcaaaagataacccatttcacaataaacatttaattacatcacctgaacgaataaaatctgtccgcccggcgcagcgtcaacgcgctttacctttctattcacaggccagtcatgactaacagcaaccgtattaagctcacatggatcagcttcttctcctacgccctgaccggcgcgttggtgatcgtcaccgggatggtgatgggtaacattgcggattatttccatctgcccgtttccagtatgagcaacacctttacctttctgaacgccggtattcttatctccatcttcctcaatgcctggctgatggaaatcgtgccgctgaaaactcagctgcgctttggctttattttgatggtgctggcggtggccggcctgatgctcagccacagcctggcgctgttctccgcgtcaatgttcgttcttggcctggtgagcgggatcaccatgtcgatcgggaccttcctgatcacccatatgtatgaaggccgtcagcgcggggcgcgtctgctgtttaccgactccttctttagcatggcgggcatgattttcccgatggtcgccgccgtcctgctggcgcgcagcatcgagtggtactgggtctacgcctgtattggtctggtatatgtcgctattttcgtcctgactttcggctgtgattttccggtgctgggcaaaaaagcccagagcgaaaacagccagccggtggtgaaagagaagtggggcatcggcgtgctgttcctctccgttgcggcgctgtgctacatcctcggtcagctgggctttatctcctgggtaccggaatatgcgaagagcctgggcatgagcctcggcgacgccggtaaactggtgagcgatttctggatgtcctacatgatcggcatgtggtcattcagcttcatcctgcgcttcttcgacctgcagcgtatcttaaccgtcctcgccgggctcgcgacggtgctgatgtacctgtttatcaatggttcgccggagcatatgccgtggtttattctgaccctgggcttcttctccagcgccatttacacctcgatcattacgctcggttcacagcagacgcgggtcgcttcgccgaagctggtgaactttatcctcacctgcggcaccatcggcaccatgctcactttcgtggtcaccggcccgattgtggcggccagcggtcccctggccgcgctgcacaccgctaacggcctctatgccgtggtattcgtaatgtgctttatcctcggcttcgtctcccgtcatcgccagaacaacgctcaggcggcgtctcactaagccttcggcccctttgcatccgcaagggggctgttcctcataaaagaaagctcctcgccaccgcggtcagtttggatccagctttgcgccggctgggtggtcgcgatcacccttccctggcgaattgaccagcgcaccggcacctggcagcggacggcctcaaagccattctccgccgggagaatgatcaggttagccgggttgccgctgacaatgccgtaatcctcgaggccaaacgtgcgggtgctgttgtcggtgataagctgcaggccgtcgttgatctgctggtagcccatcagctggcaaacatggagccccatatgcaggacctgcagcatattgccggtccccagcgggtaccacgggtcaaagacgtcatcatgaccaaagcaaacgttgatccccgccgccaacagctccttcacccgggtaatgccccgtcgcttcgggtagtcgtcaaaccggccctgcagatgaatattcaccagcggattggcgacaaagttgatgccggagagcttaagcaagcggaacagacgcgaggtataagcgccattataggagtgcatagcggtggtatggctggccgttacccgcggccctatccccgctttcagcgccagcgcggcaacggtttcaacaaagcgcgactgctcatcgtcaatttcatcgcagtgaatatccagtgggcggtcatattgctgcgccagacggaaggcgatatgcagcgattccacaccatattcacgggtgaactcaaaatgcgggatcgccccgacgacgtccgcccccagcttgagggcctcctccagcagcgcctcgccgttggggtaagagaggatcccctcctgtggaaaagcgacaatctgtaactcgacccatggcgccacctcctgtttgacctccagcatcgccttcagcgccgttaacgtgggatcggaaacatcgacatgagtgcggacaaactgcacgccattggcgatctgccacttcagggttttccacgcccgggctttgacgtcctcatggctgagcagcgctttccgctccgcccagcgctcaatcccctcgaacagagtaccggactgattccagttcggctcgccggccgtctgggtggtatccagatggatatgcggctcgataaaaggcgggatcgctagcccgccgcgagcgttcaatacctcatagctttcatcgtgcgcctcccccatcggcgtgatcgcgccaaagcggcccttatcaatggctatttgccacaggccgtcgcggtctgccaggcgtacgttctgaatcaaccaaagcggcgctgctgtcatatcaccctctctattcaatacggcttgttttctgtctaaccccaatcgcggcttacccaattcttgtacacaaaatcagcaaaaaggaaaagtcagcgttttccatgacttataaaaatactgacaaatcaaacgcatacccattaagtggtaggtgaagttgtcattgatttgcatcaataagcctgatggctgaatcgttaaggtaggcggtaatagaaaagaaatcgaggcaaaaatgagcaaagtcagaatcgctattatcggtaacggcatggttggccatcgctttatcgaagagcttctcgataaggcgcctgccggacagttcgacattaccgtgttctgtgaagaaccgcgtatcgcctacgaccgcgtccacctgtcgtcttatttctcccatcacactgcggaagaactgtcgctggtacgcgaaggtttctatgagaaacacggcgtcaaggtgctggtcggcgaacgggcgatcaccatcaaccgccaggagaaagtgatccactccagcgccgggcgtaccgtgttctacgacaagctgattatggcgaccggttcatacccgtggatcccgccgattaaaggcgcggaaacccaggattgcttcgtctatcgcactattgaagatcttaacgccatcgaatcctgcgcccgccgcagcaaacgcggcgcggtagtcggcggcggcctgctcggcctggaagcggccggagcgttgaaaaacctcggcgtggaaacccatgttatcgaattcgcgccgatgctgatggccgaacagctcgaccagatgggcggcgagcagttgcggcgcaaaatcgaaagcatgggcgtgaaagttcacaccagcaaaaacaccaaagagattgttcagcagggcaccgaggcgcgcaaaaccatgcacttcgccgacggtagcgagctgcaggtcgatttcatcgtcttctcaaccgggatccgcccgcgcgataagctggccacccagtgcgggctggcggtcgcccagcgcggcggcatcatggtcaacgatagctgccagacctccgatccggatatctatgccatcggggaatgcgccagctggaacaaccgcgtctacggtctggtcgcccccggctataaaatggcccaggtggccgtcgaccatctcctcggcagtgaaaatagcttcaccggcgccgacctcagcgccaagctgaagctgttgggtgtggacgtgggcgggatcggcgatgcccacggccgcacgccgggcgcccgtagctacgtctatctcgacgaaagcaaagaagtttataagcgcctgatcgtcagcgccgacaacaaaacgctgctcggcgcggtactggtcggcgacaccagcgactacggcaatctgctgcagctggtgctcaacgccatcgagctgccggaaaacccggattcgctgatcctcccggcccacgccggcagcggcaagccatcgatcggcgtggataaactgccggacagcgcgcagatctgctcctgctttgacgtcagcaaaggcgacctgatcgccgctatcaacaaaggctgccacaccgtggcggcgctgaaagcggaaaccaaagccgggaccggctgcgggggctgtattccgctggtcactcaggtgctcaacgccgagctggcgaaacagggcattgaggtcaacaacaatctgtgcgaacacttcgcttactcccgtcaggagctgttccacctgatccgcgtggaaggcatcaaaaccttcgacgagctgctggaaaaacacggtcagggctacggctgtgaagtctgtaagccgaccgtcggttccctgctggcctcctgctggaatgagtacatcctcaagccgcagcacacgccgctgcaggacagcaacgacaacttcctcgccaacattcagaaagatggtacctattcggtgatcccgcgctcagctggcggcgaaatcacgccggaagggctggtcgccgtgggccgtatcgcgcgtgaattcaatctgtacaccaaaatcaccggctctcagcgcatcggcctgtttggcgcgcagaaagacgacctgccggagatctggcggcagctgattgaagcgggattcgaaaccggccacgcctacgccaaagcgctgcgaatggcgaaaacctgcgtcggcagcacctggtgccgctacggcgttggcgacagcgtcggcttcggcgtggaactggaaaaccgctacaaaggcatccgcaccccgcacaaaatgaagttcggcgtctccggctgcacccgcgaatgtgccgaggctcagggcaaagacgtcgggatcatcgccaccgagaaaggctggaacctgtacgtttgcggtaacggcgggatgaaaccgcgccacgccgatctactggccgcggacctcgatcgcgagacgctcatcaaatatctcgaccgctttatgatgttctacatccgcaccgccgataagctgacccgcactgccccgtggctggacaatatggaaggcggtatcgactatctgcgcagcgtcatcatcgatgacaagctcggtctgaacgaccatctggaagaagaactggctcgcctgcgcgccgccttcgcctgcgagtggaccgagaccgtcaacaacccggcggcgcagacccgcttcaaacactttatcaacagcgaccagcgcgacccgaacgttcaggtggtgccggaacgtgaccagcaccgcccggccacgccgtatgagcgtatcccggttactctggtggaggaaaaagcatgagccagtgggtaaatatctgcagcatcgacgacatcctgccggccaccggcgtctgcgccctgctcggtcagcagcaggtggcgatcttccgtccctaccatgacgacagagtattcgccatcagcaacattgatccgttcttcaacgccagcgtactgtctcgcgggattatcgccgagcatgacggcgcgctatgggtcgccagcccgctgaaaaaacagcgcttccgcctgagcgacggcctgtgcatggaagatgccagccactctatcgcccgcttcgacgcccgcgtgaaagacggacacgttcagcttaaagcgtaagtacttctccctccccccggccacggggggagatataagtaacagttctgaccgacagcgcatgagtgcgggatatgtcgcatgttttgtattacctttgctgctattctacgaccactcgttttctaccccttatttttatgaggttattctgtggatcacttacccatattctgccagttgcgccagcgcgattgtttactggttggcggcggggatgtcgccgaacgcaaagcccgtctgctgctggatgctggcgctaacgtcacggtcaatgcgctcgacttcacgccccagtttcaggtgtgggctgattcacagatgctaactctggtgcagggggagtttatcccctcgctgctggataactgctggctggccatcgccgctactgatgatgagacggtcaaccagcaggttagcgaggcggccgaagcgcggcgtatcttctgtaacgtggtggatgccccgcgccaggccagctttatcatgccgtcgatcatcgatcgctcgccgctgatggtcgccgtctcctcgggcgggacatcaccggttctggcgcgcctgctgcgcgagaaactggagtcaattctgcccctgcatctcggccagctggcccgctatgccggccatctgcgcgcgcgggttaagcagcagtttgccaccgtaggcgagcgtcgccgcttctgggagaagctgtttgttaacgaccgtctggcgcagtcgctggctaatgacgatcggcaggcagtcgcggataccactgagcagttgctgacggagccgttggagcatcgcggcgaggtggtgctggttggcgccggccccggtgacgccgggctgctcacgctcaaaggcctgcagcagatccagcaggctgacgtggtggtctatgatcggctggtctccgatgacatcatgaatctggtgcgccgcgatgccgatcgggtattcgtcggcaagcgctcaggctaccactgcgtcccgcaggaggagatcaaccagatcctgctgcgcgaagcgcaaaaaggaagacgcgtggtccggctgaaaggcggcgatccctttatctttggccgcgggggggaagagctggagacgctttgcgaggcgggcatccccttctccgttgtgcctggcattaccgccgcctccggctgctccgcttattcggggatccccttgacccaccgcgatttcgcgcagggcgtccgcctggtcactggccacctgaaaaccggcggcgagctggactgggcgaacctggcggtggagaagcaaaccctggtgttctacatgggtctgaaccaggcgccggcgatccgcgagaagcttatcgctcacggcatggctgaagatatgcccgccgccatcgtcgagaacggcaccgctgtgacgcaaaaagtggtcagcggcaccttaggacaactggatattctggcgcagcagatggccagcccggcgctgatcatcgttggccgcgtggtcggtctgcgggataaactgaactggttttcgaaccattaaccttgcctcccataaagcgacaggcataaaaaagggcgggatatcatcacgcccttttagctgttgcgtcgcttacggcttggcgacaaagccaatcgcttcgtataccgctttcagggtttgagaagcccgcgcgctggccttttccgcgccgtctttcatcacctgattgagaaacgcttcgtcgttacggaaacggtgatagcgctcctgcaggtcaatcagcatgcccgataccgcttcggcgacttcgcctttcaggtggccatacattttgccttcaaaatgctgttccagctcaggaatagttttcccggtaaccgcggagaggatatccagcaggttggagacgcccgctttctctttcagatcgtaacgcactaccggcggctcgtcggagtcggtgaccgcacgtttaatcttcttgaccaccgatttcggatcttccagcaggccgatgacgttgttgcggttgtcgtcggacttggacatctttttcgtcggctccagcagcgacatcacgcgcgcgccggatttagggataaacggctcaggcactttaaaaatatcgccgtagatggcgttaaaacgctgggcgatatcgcggcttagctcaaggtgctgtttctgatcttcgcccaccggaacctggttggtctggtacagcagaatgtcagcggccatcagtaccggataatcaaacagaccggcgttgatgttctccgcgtagcgcgctgacttgtctttaaactgagtcatgcggctcagttcgccgaaataggtgtagcagttcagcgcccagcctagctgggcatgttccggcacgtgcgactgcacgaagatagtgcttttctgcgggtcgatgccgcaggccagatacagcgccagggtgtccagcgtcgccttgcgcagctgctgcggatcctggcgcacggtgatggcgtgctggtccacgatgcaatagatgcagtggtaatcgtcctgcatgtttacccactgacgcagcgcacccatatagttgccaatggtcagttcacctgagggctgtgcgccactaaaaacgatgggcttagtcatgtttcaattcctgagtttcactgtgcggtaacccgagagcgggtaagagttcgttaaactggtcgaagagatagtccggctcgctcagcgcaagcggttcaccatagttataaccgtaggtcagaccaacagagcagcagcctgccgctttgcccgcctgaatatcattgcgcgaatcgccgacaaacagcagctcggctggagccagagagagcttttccgccaccagcagcagcggttccggatgcggctttttattctgcacgtcatcgccgccaatcaccacggtaaaatatttcgcaatatcgagcgcgtccaacagcggggcgacaaacggcgtcggcttatttgtaaccagcgccagcggcaggcctttggcatgcagcgcgccgagcgtatcggccaccgccgggaacaggaaactgccctcttccgccgcttcggcgtaatagcggtcaaacagtttacgcaaaatgcgcagctgctcgtcttgcggaatatcatgatcgtcgacggaaggcttgcccatcgccgcacgtaacgttgctcgctcctgacgagcccaggtcagcgcccgctccatcaggacatcggcgccgttaccgatccaggtgataacgcgttcttctcccgccaccggcagctccagggcgtacagagcgttatcaaccgccgaggttagacccggcgcgctgtccaccagcgtgccgtcgagatcaaatgcgatgccgcggatcgcctgtaatttatccatgactcaccttcgctaattcactacgcatttgatcaatgacttgcttgtagtccggctgaccgaagatcgccgaaccggcaacaaacatatccgcacccgccgcggcgatttcgccgatattgctggctttcacgccgccatccacttccaggcggatgtcgtagccggacgcatcgatgcgctggcgcacttcacgcagtttatccagcgtctggggaataaaggactggccgccaaagcccgggttaaccgacatcagcaggatcacgtccagcttatccatcacgtaatcgaggtagctcagcggcgtcgccgggttaaacaccaggcccgctttacagccgtgctctttgataagctgcaggctgcgatcgacgtgttcggaggcttccggatggaaggtgataatgctggcgccggcttcggcaaaatcaggaatgatgcggtcgaccggcttcaccatcaggtgaacgtcgattggcgcggtaataccgtaattacgcagtgacttcagcaccatcgggccaatcgtcaggtttggcacgtagtggttgtccataacgtcgaagtgcacgacatccgcacccgccgccagcgccttcgcggtatcctcacccagacgggcaaaatcagccgacagaatcgaaggggcaatcaaatactgcttcatccgcatctccttgaaatttatttggtcttaggcggacggtagagcgctaatagctcgtccacctttttacgcgtaccaccgttgctgctgatgctgcgccgaaccttcacaatatgcgtttctgccgcgtttttataccattcctgcgtcagcggcgtgcggtggttggaaatcagcaccgggatgcgctttttcatcagcgattccgccttttgcgccagcagtacctgttgttccaggttgaaactgttggtgtggtaggcggtaaagttcgccgtcgccgttagcggcgcatagggcggatcgcaatacaccactgtgcggctatccgcacgttgcatgcactcttcgtaagattcgcagtaaaactcggcgttttgcgccttctcggcgaaatgatagagctcagcttcggggaaatagggctttttataacggccaaacggcacattgaactcgccgcgcagattgtagcggcacaggccattgtagccgtgacggttcaaatacaggaacagcaccgcgcgacgcagcggatcttggctttggttaaattcatcacgatacaggtagtagcgctcagcgacgttattttccggggtaaacatctcacgggcggcggcgacgtattcgtcggtgcgcagtttgacgatgttgtacaggccgattaagtcactgttgatatccgcgaggatataacgagaaaagtcggtattaagaaataccgacccggcgcccacaaagggctcgatcaagcactcgccttccggcaaatgctttttaatatcgtcaagcagggggaactttccccctgcccacttcagaaaagcgcgattctttttcatgctgcctaactaattacacgttctccggctgtggagaaagctccgacagcatcctgcgcttaagactaccccacggcattatttcaggtcagcctgaacctgatgcagcggttttgcccatggatttttcgcctgcacgtccgccggcagcgaggtgacagcacgtttcgcttcatctttcgatgcatagataccgctcaccagcacgtaccatggttggccgttacgcgacgtttcatagacaacatatttatccagcttctctttcttcgcccagttgttgaggttgtcgtagttagaggagctgctgagctgcagagtatagtgacccgacggcgcagttttcattgagctgacgtcacctgccgtcttcccgctcttcgctgccggcgctgccgcagctgccgttgccgctggcgctgcggtcgtcgtggtcggtttgctctgagcggtggccaccggtttgctttcgctgacggacgttttcgccggagcggtggtcgccgtgctttcaacatgcttcggctggaccggcttcgattctaccggcgttttcgccacggcctgtggcttcgactgcggcttcgcttcgataacggtatgcttacgttcagccggacgcggggtcgctgctgtctgacgctcggtcgcctggcgcggcgccgcggtgccattggcgccattccggattggcgcgacggtagccggttcagtcggcagcgtcgagttagccacggcgccgtccagttggccctgctgctgggtcaacgcattgttcagatcgccctgaacttcgatacgctgctggccctgcggcgcaaccgctgcctggccctgcgtcgggttcgcggcaataggcggtaccgttacgtcctgctgtgaggtgctgttagcggcggcagtctggtcctggccggcagcaggcatgctggcggactggtcgtcagacagattaatgctcttctcgccggaagcggtctgctggctggaagatgatggcgatttcagtgcggaaccgatacccacgatcaacagcagcagcaccagaatccccacacccatcatgatgtactggcgggaggccggtttggccggcgcttttttacgcttgcgcggacgacgctctacaggctgctcttcgagcatctcctcgtcttgcgcatccagttcttcttcgaactcttcctcttcacgctcgcgacgggccttaccagcgcgcgtcggacggccttcatcggcatcaagatcaacatcgtcaaaattgatctgcggatcggcatcacgctcggaagactgacgggaacgaccagcacgacgatcgttgcgatcggctttcatatcgtcttctggtttgaaatcatccatttaacaccccactaaaaggcttatgctcacgattattgcacatcacccgaaatgataacgccgcgcgaacgcggccagaccttcttattgttgcgcctgctgagtatcagcaatcgcgccaagaaccacatcgtgcggcactccgccgcgcagctcgctgcttcctattgcgagcgggagcaccagccgcatttcgccagccagtacctttttatcgcgcatcatatggggcaaatacgcctgcgcactcatttcctgcgggccgcgtaccggtaagcctgcacgcttgagcagatcgataatgcgctgagtatcctgcgcgcggaactgccccagccgttcggacgtgcgtgccgccatcaccatacctgccgccaccgcttcgccatgcagccagttaccgtagcccatttccgcttcgatagcatggccgaaggtatgtccaagattgagtaaagcacgtaacccggtttcacgctcgtcggctgccacaacctccgctttcagttcacagcagcggcgaatgcagtacgccatggcggtatcgtccagcgccagcagcgcatcaatgttgttttccagccagctgaagaattcaccatccaggatcaccccgtacttgatgacctcagccagtccggaagcgagctcgcgcttcggcagagttttcagacagttaagatcaactaccacggaaaccggctgccagaaggcgccaatcatgtttttgccgagagggtggttcactgcggttttgccgccgaccgacgagtcgacctgcgacaacagggtggtagggacctggatgaaacgcacgccgcgctgatagcttgccgcggcgaaaccggttaaatcaccgatcacccccccgccaagcgccaccagagtggtgtcgcggccatgtggtttttgcaacagcgcagtaaacacggtatccatcaccgccaggcttttgtattgctcgccgtctggcagaatgacgctgtcaacgttgacccctgactgctccagcacagagcggacggtatccagataaagcggcgccagcgtttcgttggtgaccagcatagcctggtcgcccgacttgagtggcaggaaggaagctggatcgttaaacaaaccagccgcgatggtaatcgggtaactacgttccccgagggtaacagtaagcctctccataacgcgacatccacctcaatgactattactctgacgcacttttattaagccagaatcagttgctttccagcatatgaataatctggttcgcgacgactttcgcactctgatcgtctgtgcggatagtcacatcggcgatctcttcatacagcgggttacgctcgtcagccagcgcttccagcacttcacgaggcggcgcatcgacttgtagcaaaggacgctttttatcgcgctgcgtacgggccaactgcttctcgatcgtagtttccaggtagaccaccacgccgcgggcggagagacggttacgcgtttcacgggattttacagagccgccgccagtcgccagcacaatcccctgtttttccgtcaactcattgataattttctcttcacggtcgcggaagccttcttcgccttcaacatcgaagacccagcccacatcagcgccagtgcgtttctcaatctcttgatcagaatcgtaaaattccatgttgagctgttgggctaactggcgcccaatagtgcttttgccggcacccataggcccaaccagaaagatattgcgtttctctgccattttttcggtactactaagactattcgttaatgataaacccgcttcgcagacacccagcgccgcagggcatgaactgaaacctcatatgcaatagagcgagagtcagactaaaaattatctcaatactccggctggtttggcaactgaataaaatcgccggacaataaagccggacaataaagggaggattgatgtcgtacccgactctcaaatcggtaccccttgtatgctaaatccgtcctcacgtcaaacacctgaaacgtgtttagcatgaaaaacctgcttaacgtactgccagaatccgtggcgtaataaagacaaccagttcgcgacgttcattatctttcccgtcacgacgaaacagacgtcccagtaccgggatatcgccaagcagcgggacgctgtcgcgggcggttttgtttttctgcgaaaagatgccgcccaacgctaaagtctcgccgctgcgaacttccaccagggtctctatctcctgcttatcgatggccagcgcttcgccgttttcctgcttcagcacctggcctggcgtattctcgcttattcgcagcttaagccgcactcttccctgctgcagcaccgtcggcgtgacctccatgcccagcaccgcctctttgaactccaccgaagtggcgccgctttcgccactggaaacctgataggggatctcgcttccctgcttgatgctggcaggctgcatgtgggaggccaataaacgcgggctggcaataatttcgacctgctgcttgcgctccagcgcggatagctccagctcaagcaagcgaccgttgatcttgccgatgttaaaccctgcgcgggtgctggcatcgtttaccgatacatcgctgcttagggtggtgatttgcccggagcctggcgggcttccggcttccgcaagccgccacttcacccccagctcacgaaggctggtttcgctcatcgacacgatatgggcggccagctccacctggccgaccggcagatccatctcctgcgcccaggccttcaacgccggcaggtgccgggcatcatcgcggatcagcagccgattagtccgcttgtccgccatcaggtgtcccctggcgctgagcagctttccgccgcttttagccagctcctcagcgtcggcaaagtgcagggtcacgctctccgcctgcaggggcaggttctgcaggcgtttctcctgttcggcttcacgctgcgcctgatttgccttttgccaggcctgagtgtgcgcgtagatgaccgtcccctgctgttgcaaagagagacccgcgctatccgctaccgcccgcagcgcctggctccagggaaccttctgcagacgcagggagagcgtgccgctgacgtccggcgcgacgacgaggttcttatggttcatttcggccagagcttgcagcacctgggccactggcgcatcgtcaatcaccagcgaaaccggtttatcattgcgggcggcgggggccaccgccagcggcagcagcagaagcagcaggcttatccatcgcatcatgttgtttcccttcacgttgccagcgccacgctggcggttcacatcccgaagacgtgacgatgtccagctcaccggccgtcagccggctcacccgccagcccgtgggcaattgctcatccatgcgtacccgtcgccactttccgttcccatcctgcagaaaccccgtccagccagcatcatccccaaccgccccgccatagcgccattgcgaaagctgcgccgtgcggcagggatcctcaaccggctggaaagggtcacgctcggccgccagcagcgacagcggtagccacaggaagatccagcgtttaccgctcatcttccgcctccagcagcagtcgcaggcggagcgtctgcgcctcacggcccagcgaaaacgaacgcggattcatcccgcagcgcgccagccaggaaaaaagcgcgggtaccgttgaccaggacagggtcagctccatctcgccgccgcttccctgcggacgccaggcgataagcttcgctccggagagcggaatggctatgggcgaaaatgactgcgtgtcgatgcgcgccccgggattttcctcgccggggatgcgcagcgccatgatccgccgccactgcgtttgcaacgccgcatcacgggttaccgccgcctgcggagggcgcagatcgcgccagagcgccacgccgcctcccgacagccccattgcgagcaggatcggcagccccgtccaggtgccccgaaggttaatccgcatcagcgcgcgctcccgtcagggtaaaactgaactgccaacgcccctcggcgtcgcgctgggtcccgccggcttttgccggcgcgaatcccgcgacgcgagtcagcgcagcctccacgctggttaacgcctgcaggttaagggccaggccgtccagcgtgaggagtacgccctggtactccagccgcgtcagccacgcctgcgcgggcagatctgccgccagcgcctgcagcctgggttgccaggcggcgatcgccgatctgcgctggtactgctggcgctgccgttgatgctgctgccacgcctcacgcatcgcctgctcgcgctgcttaagcgaagcgagcagctgcgcgtcggccgtcgtgtgaagcgtcgccaggaagtcgcgctgcagacgcgccgttcggctcaccagcaggcccatcccgcccagcagcacaatgccgatggttaacaacaggacgtagcgcaggcgctggcggcgacgcaggtcgcgccagggaagaagattaacgacatgcgtcatgccgcccgcctcccagcgccagcccaagggcaatggcgtaacgatcgccatcggctggcagcgggggctgccgacggtgaatcacttgccagacatcaaagcgactggcctcatcgcccgcgtcaatacacaggcgcagcggaacctgaagctgccccgccagctggcttaaggacccgacatcagcgcaggcgtcactgccccaggcctcacgggtcgcccacagccagtgcttttcatcccgccacgccaggccctggtctgccgcagtcatccaggggaaaaaggcgccgagcgcactggcatccggtacgatggccgccacccgcagccgcagccgccctgccagctcccgcagaacattgatatccagccgctgcgccgccgtaacctgccagccgtcatcccgcgaggtgggcgcataatcaatacatagcgcggaggcaggcattgccagctgctggctcatggcgctggctacccacgtcgcctgttcccgctcccgcagggcgaactggggatacggaagacgcttttgcagtgtgcgcaccgcgggaaaggcgatactaacctgatgctgcgccggtagctcccgccgccaggcggccagccgcgaaccgagtgcgctgacgtccgccaccattccctgacgtaccagccccggcggcaatgggatacgccaccagcggcgcagcgcccagtgtgaacgttcatgcaatagcgcgacaatggcaatgctatcctgttggatatgcattccaagccgccagtttctgaaagccatgcttacgatctccttatccggcaaaactgcccggctatatcaatgcacctggcttgcctttatactaccgcgcgtttgtttataaactgcccaaataaaactaaatgggaaaacaccggtgaagttcgtaaagtatctattgatccttgcagtctgttgcgtactgctgggagcaggctcgatttttggcctctacaaatacatagagccgcaactccccgacgtcgcaaccctgaaggatgtgcgtttgcagatcccgatgcaggtctatagcgccgacggtgagcttattgcgcagtacggcgaaaagcgccgtatccctgtgacgttgcagcaaattccccccgagctggtgaaagcgtttatcgccaccgaagacagccgcttctatgagcaccacggcgtcgatccggtaggtattttccgcgccgccagcgtggcgatgttttcaggccacgcctcccagggcgccagcaccatcacccagcagttagcgcgtaacttctttctcagccccgagaagacgttgatgcgtaagattaaagaggcctttctggccatccgcatcgagcagttgctgaataaagatgaaatccttgagctgtatctgaacaagatctacctcggctaccgcgcctatggcgtcggcgccgcggcgcaggtctattttggcaaacctatcgaccagctgaccctgagtgagatggcggtgattgccggtctgccgaaagcgccttccacttttaacccgctctattcgatggatcgcgcgaccgcccgtcgcaacgtggtgctgtcgcgtatgctgagcgaaggatacatcacccaggcgcaatacgatgaggcgcgcagcgaacccatcgacgccagctatcacgcgccgaaaatcgccttctccgccccttacctgagtgaaatggtgcgccaggagatggtgaatcgctacggcgagcaggcctacgaagacggttatcgggtctataccaccattacccgcaaaaaccagcaggcggcccagcaggcggtacgcaataacgtgctggattacgatatgcgtcacggctaccgcggcccggccagcgtactgtggaaagtcggtgaaacgccgtgggagacgaagaagatcgtcgattcgctgaagcgtcagtctggctacggtccgcttttcccggcggtggtcacctccgcgaatgcccaggaggctgtcgcgctgttggctaacggcgactccgtttcgctgacgatggagggcgtgcgctgggcccgtcgctttatctctgatacgcagcaaggggcgaccccgcgtaaagtcaacgacgttgtgcaggccgggcagcagatctgggtacgcaaggtgggtgacagctggtggctgtcccagctcccggacgtcaactcagcgctggtctccattaacccgcaaaacggcgcgattattgcccttgtcggcgggtttgactttaaccagagcaaattcaaccgcgccacccaggcgctgcgccaggtcggctccaacattaaaccgttcctctataccgccgcgatggataaaggcttaacgctggcaagtatgctcaacgatgtgccgatctcgcgctgggatgcgggcgcaggttccgactggcggccgaagaactcgccgccgcagtatgccggtccgattcgtttacgccagggcctggggcagtcgaaaaacgtggtgatggtgcgcgctatgcgcgccatgggcgtagactacgccgccgagtatctgcagcgctttggcttcccggcgcagaacattgtccacacggaatcgttggcgctgggctcagcctcctttacgcccctgcaggtcgctcgcggttattcggtgatggccaacggcggcttcctggtcaatcctttctttatcagtaagattgagaacgatcagggcggtgtcctcttcgaggagcgtccgaaaattgcctgtccgcagtgtgatttaccggtaatttacggcgatacgccaaaatccaacgtgctggaaaacaaggatgtggaagatgtcgccacctccgcggaaccgcagaatggcaacgtgccgccgcagccgcagctggagcaggccaaccagtcgctggtcgcgcagagcggcgcacaggaatacgcgccgcatgtgattaacacaccgctggccttcctgatcaagagcgcgctgaacagcaacatctttggcgagccgggctggatgggcaccggctggcgcgccggacgcgatctgcagcggcatgacatcggtgggaaaaccgggaccaccaacagctcgaaggacgcctggttctcaggctacggaccgggcgtggtgacctcggtttggatcggctttgacgatcatcgtcgcgatcttggccggaccaccgcctccggagcgattaaagatcagatctctggctatgaaggcggtgccaaaagcgcccagccggcctgggacagctttatgaagagcgtgctggaaggcgttccggaagaaccgttaactccgccgccgggtatcgtcacggtgaatatcgaccgcagcaccggtcagttggcgaacgggggcaatagccgggcggagtactttattgaaggaacccagcccacccagcaggcagtccgtgaggtgggcaccaccctgactgacggtggcggtgaaacccacgaattgttctgacaaaaaaagcgcctgcgggcgcttttttattgctgcttagcgtgaacgctcgttcagagtcggccctgggcctgcagccattcccgcactaaaaacagcgcgctgacgttacgggcctcgttaaaatcttcttcatccagcagcgacatcagctgcgccagcggccagcgcacctgcggtagcggctcaggttcatcgcccggcagtgactccggatagagatcttccgccaccatgatattcattttgctggagaagtaggagggggccatactgagcttcttcaaaaacgtcagcttattggcgccatagccaacctcttctttcagctcgcgattggccgcttcatccacggtttcacctggatcaatcagccctttggagaagcccagctcgtaggactccgtccccacggcatactcacgaatcaaaataatgtgatcatccacaatcggcacaatcatcaccgcttcacgggtggaaggccgcatacgttcataaacgcgacgcacaccgttgctgaactccagatcgacgctttcgacattaaagaggcgcgaacgggcgacagtttcaacattgagaatggtgggtttttgtaatgatttgctcattgtcatcggtctatgctgtgattaagcagtcattgtgcgatacgcaacacgctttcggcaatccaaattgctacttatttacagagttgtaaccttttccctgcagggggaaaagtaataaagataaaaaagtcaatagcttgaattcgctttgagaatttaccgatttctgcgctttaacgtttttggtaagcttgtgcgctgctgcatgacatattcactaccctgtaagcaggtgcgccgctaacactgcagcttgacgttagtcttcacgttcaccgacgatttcgtaagaaaaaaataactttgatgggatgggcatgggcacctttctgatattccttacagctctgctaatctgcgtattgctcatcggatggtggtatcgcgctcacgccagacgccgccgactccccctactgcacgcctttagcgacgctaccacgcggcagcttcctgcggatgagcgccaggctattgagaagtatgttgccgagttgagccacgcccagcaggtgccggcgtccggtgcgaccagcgcgcctgtcgctctggcgctgaacgaacagagtgataccgtctatgcggtgacacgcgccatcacccgctacgggatcaccaccgacgcgccgaataaatggcgctatttcctcgattcggttgaagttcatctgccgccgttctgggaacagcatatcaacgatgaaaacagcgtcgagctgatccccaccgacagcctgccgctggttatcacccttaacggtcatagcctgagcgactatcgccaggaagcgcaaagctacgccctggaacgcgcttcggccacccaggcctccattcgcggcgaagagagcgagcaggtagagttgcggcagatccgtcgggaaacgcctgaagaacacgctctgaatcgcccggacgggctgcgcgaagcgatcctgatcgtcgcctcctttctgttcttttatttcagcctgattgggccagctgtctttaccccctggctggtcgccgcaggtttgttgctgctcgccgccggactgtgggggatttatgccccgccgcgtcgcgccgcgctgcgcgaaatccattgcctgcggggcgtccctaagcgctggggattgtttggcgaaaacgatcaggagcagatcaataacatctcgctgggcattatcgatctcatctatccgcgccactggcaaccctggattgcccaggacctggggcagcagaccgatattgatatctatctcaaccgccacgtggcccgtcagggacgctacctgtcgcttcatgatgaagtgaaaaacttcccgctgcagtactggctacgcagcgcgattatcgccgccggcgccctggtggtggtgattatgctgtgggccagcgtaccgttgaatatgccgtttaagttcaccctgtcgtggctgaagggcgcgcaaacgattgaagccactaccgtcagccagctggaaaaagcccatgtgcgcattggcgatacgctgcgcctgaccggtaccgggatgtgtaacatccgcacgccgggcagttggtccgccaaagaggattcgccgttcctgcctttcgattgttcacagattgtgtggaacgacgcccctcctctgccgctgccggagtctgacattgtcagcaaagcgaccgccctgatgcagtccgtccagcgccagctgcacccggaaaccgacgatgattcccgcgtcagccctgccctacgctccgccattcagaaatcaggcatggtgctactggatgatttcggcgatatcgtgcagaaaactaacgatctctgctcggcaaaggatgattgcctgcggctgaagaatgcgttggtcaatcttggcaatacccgtaactgggaaacgttaaccaagcgcgccaccgccggcaagctggatggcgtgaacgtgctgctgcggccggtcagcgccgagtcgctggagaatctggtgaccacctcaaccgcgccctttgtgatacgcgaaacctcgcgggccgcgcaggcgctgaacagcccggctcccggcggttttcttatcgccagcgatgagggcagcgtactggtcaatcagccgtggccggcggtgagtctgtatgattatccggcccatgagcagtggggcgaactgcggcggctggccggtatgctcatgcatacccccttccatgccgaaggtatcgtgaccaacctgtttactgacgccaacggcacgcagcatatcaacctgcatcgcatccccgaccgcagcggcctgtggcgttatctgggcatcaccctgctgctgctttcaatggtggggtgcatggcttaccacgccgtgcaggccctgcgtcgttatcaacgccatcgtcagcgtatggaagagattcagaaatattacgaaagctgccttaatccggttttgctcccctcatctgactcgcaagattaattttcccggcgacagggtgtgataccctgtcgcccattttccgctcgctggagagtcatcatgcactttgatatcgcctggcaggaggtcgataccgttctgctggatatggacggcacgctcctggacctcgccttcgacaactacttctggcaaacgctggtgcctgaaacctggggggccgcccgcggcctcaatttgcaggaggcgaaagacgccatgcgccaggagtatcacgccgtgcagcatacgctaaactggtactgtctggattactggagcgagcgcctgggtttggatatttgtgcgatgaccagcgaacaaggtccgcgcgccacactgcgcgaggataccgtgccgttccttgatgcgctcaaggcctgcggtaagcgacgcattctgttgaccaatgcccatccccacaatctggcggtgaagctcaaacacaccggcctggacgcgcaccttgatttattactttccacccacacatttggttatccgaaagaggatcagcgtctgtggcgcgccgtggcggaggaaactggccttgaggcgcacaaaacgctgtttgtcgacgacagcgaggcgatactggatgccgcgaaggagtttggcattcgttactgcctgggtattaccaatcctgactccggactggcggaaaagcagtatctgcgccatccggggctgaatgattaccgacgactgatcccttcgcttaccccgaaggagaggcgatgaaagagaagcccaccgaaaccgtcagactggacaaatggctttgggccgcccgcttttacaaaacccgcgcgctggcgcgggaaatgattgaaggcggcaaggtgcattacaacggacaacgtagcaaacccggaaaaatcgtcgaactcgacgccatgctgacgctgcgccagggcaacgacgagcggacggtgcgcattatcggcattaccgaacagcgccgcccggcaagcgaagccgtcaacctgtatgaagagacggcggagagtatcgagaagcgtgaaaaaatggccctggcgcgcaaaatgaacgccctgaccatgccgcaccctgacagacgtccggacaagaaagagcgccgcgacctgatgagatttaaacacggcgagagtgaataactcgcgccagaaagagagatgattatgactcaacacgatcaattacatcgttatctgtttgaaaactatgccgtgcgcggcgagctggtgacggtgtcggaaaccctggaacagattctggcgaatcacacctatccccaaccggtcaaaacggtgctggcggagctgttggtcgccaccagtctgctgaccgcgacgctgaagtttgccggcgacattaccgtacagctgcagggggatggccctttacagctggcggtgatcaacggcaataaccagcagcagctgcgcggcgtcgcgcgcgtgcagggcgagattgcggacgatgcggatctgaaaacgatggtcggcaacggctacctggtcattaccatctctccggaagaaggtgagcgctatcagggcgtggtcggtctggaaggcgatacgctggccgcctgcctggaagattatttccagcgttcagagcagctgccgacgcgccttatcatccgcaccggcgatcatgaaggccagccgatggcgggcgggatgctgctgcaggtgatgccggcgcaggatgcccagactgccgacttcgagcacctggcgacgcttaccgagaccattaaggcggaagagctgttcaccctgccggcaaatgatgtgctgtggcgcctgtatcatgaagaagaagtcacggtctacgacccgcagagcgtggagttcaagtgcacctgctcccgcgaacgctgcgccggcgcgctgaagacgctgccggatgaagagattgatagcatcctcgccgacgaaggcgaaattgatatgcactgcgactactgcggtaaccactatatcttcaatgccatggacatcgccgagatccgtaataacgcctctccggccgatccgcaggttcattaatccccgcatctttctcaggcacagggcggcaatgttgtttgtcgcgttgtgcctgacttttaatttattcgcgagttgaatcgattttccctgaaagagttacgtaatttaatttcaggaaagcgattacattcacatttcggcagtttttttaattactttttaaccattgagaaacatctaaccccaccatccgcccatttcctgagataatccactccacttcgtgacaggagtcaccgtttttatcgtcattctgaggaatgtcgagatacgtaaatctatgagcctggtcgcggtcaatacccggcaattaaccctacaatttacagcagtacatcttggctaaggagcagtgacatgcgcgttaatcatggtttaaccccgcaggatctcaaggcttatggtatcaatgacgtccaggatatcgtccacaaccccagctacgacatgttgtttcaggaagagctcgacccgaacctggaaggctacgaacgtggcgtattaaccactctgggtgctatcgccgtcgacacgggcatttttaccggtcgttctccgaaagataagtatctcgtgcgcgacgacaccacccgcgacaccgtctggtggtccgataaaggcaaaggtaaaaacgacaacaagccgctttcgcaggaaacctggcagcatctgaaagggctggtgacccagcaactgtccggtaaacgcctgtttgtcgtcgacgctttctgcggcgccaacgccgatacccgtctcagcgtacgtttcattaccgaagtggcctggcaggcgcacttcgttaaaaacatgttcatccgtccgagcgatgaagagctggctgaattcgtgcccgacttcatcgtgatgaacggcgcgaaatgcaccaatccgcagtggaaagagcagggcctcaattcggaaaacttcgtcgccttcaacctcaccgagcgcattcagctgatcggcggcacctggtacggcggcgagatgaagaaagggatgttctcgatcatgaactacctgctgccgctgaagggcatcgcctccatgcactgctcagccaacgtcggcgagaaaggcgatgtcgccattttcttcggcctctcaggcaccggcaaaaccaccctctccaccgacccgaaacgccgcctgattggcgatgacgaacatggctgggatgacgacggcgtgtttaacttcgaagggggctgctacgccaagaccatcaagctctctgaagcggccgagccagatatctatcacgccatccgccgcaacgccctgctggaaaacgtggtggtacgcgccgacggcacggtcgatttcgatgacggttcaaagaccgaaaatacccgcgtctcctaccccatcgaccacatcgacaacattgttaagccggtgtcaaaagcgggtcacgccaccaaagtgatcttcctgacggccgatgcgttcggcgtcctgccgccggtctcccgcctgaccgccgaccagacgcagtaccatttcctgtccgggtttaccgccaaactggccggcaccgagcgcggcgtaaccgaacccacgccaaccttctccgcctgcttcggcgccgccttcctgtcgctgcacccgacgcagtacgccgaagtgctggtcaaacgcatgcaggcggctggcgcgcaggcttatctggtcaataccggctggaacggcaccggcaagcgcatctcgattaaagatacccgcgcgatcatcgacgccatcctcaatggctcgctggacaacgcggagacctttaccctgccgatgtttaacctgcagatcccgacggcgctcccgggcgtggatacccacatcctcgatccgcgcagcacctatggttccccggagcagtggcaggaaaaagccgaccagctggcgaagctgtttattgagaattttgagaagtataccgatacgccagcgggcgccgcgctggtggcggcaggaccgcagcgctaacgggcgcaaaggtgaaaaagccgggcttgcccggctttttattgtgcaacatcctgagcagctaaccgcgggcgcgatcagctctccctggcgggtttcatcggcgccagcatccggtgcaccggcagccaggcgcggatcagtaacccgccgcgttcgctggagccaatctccagccggccgttgtgattgtcgataatacgctgaacaatcgccaaccccagcccggtgccgctggtgctgcgggcgctgtcgccgcgtacaaacggctgaaacaggtgctcccgctgctcaggtttaatccccggtccatcatcttctacctggaaccaggcccggctcgcttcgctgccgctgctgaccttgatccagccattgccatagcgggccgcgttgaccaccatattcgccagcgcgcgcttgatagacagcgggtgcatacgtaccggaatctcgccggcctgcagggcggtggcgatttcccgctcatagccgctctccgcagcgatcacttcccccagcaccgcattcagatccgccagctccatcggcatctcctgcccggtgcgcagatagtcgataaactgctcgatgatggcgttgcactcttcgatatctttgttgatcgactccgcgagatagccgtcctgctcgcccatcatctcggtggccagacgaatgcgggtcagcggggttcgtaaatcatgactgaccccggccatcagcagcgtacggtcatcagccaactgcttcacgcccgccgccatatggttaaaggcgcgcgtcaccgaacgcacttcggaggcgccatactcgcgcagcggcggcggaataatgccgcgcccgacctgcagcgccgcgtgctccagatccaccaacgggcggttctgaatacgaataaacagccaggcgccgcctatcgccagcagcatgatcgccagggtatagcggaacagcggcgagaagtcgccctgatggatctcggtcagcggcacccgcacccagatattgggcgacagccaggtcttcagccacaccacaggggagcttttattgacctctacccgcacctctgtggggccaccaagctgatgggccatctgctgacttaagaattcataatgctgcgcccagcgcaggcctgcgtcttccgccgcttcattggaatagagcgaaatccccagctcgcgataaatttcacgacgaaacgccgggggcaccaccagctgggtgccatcctccagctgcagtttgtcggtcatcagcatacgcacttcgtaggctaacactttattaaactgctggagactcggcaggatcgcgaaattcagtaccaccagataggtcgtcaccaggctgacgaacagcaaagtgacgatcaggagcagtgtgcgagcaaaggagctgcgcggcgaaaagcgcacgcgtttcatgccttagaaccgtccgggacgaagacgtagcccagaccccagacggtctggatgtagcgcggatgcgccgggtcctcttccaccatgcggcgcaggcgggagatctgtacgtcgatggagcgctccatcgcagagtattcgcggccgcgggcgaggttcatcagcttatcgcgcgacagcggctcacggggatggctcaccagcgccttcaggaccgcgaattcgccgctggtcaacggcatcggctcgtcttcacggaacatctcgcgggtacccaggttcagtttgaatttaccaaaggcgataaccgcctcttcctgcgacggcgcgcccggcagctcgttcgcctggcggcgcagcaccgcccggatgcgggccagcagttcgcgcgggttaaacggcttcggaatatagtcgtcagccccgatctccagacccacgatccgatcgacctcttcgcctttcgccgtcaccataatgatcggcatcgggttactctggctgcgcagacgacggcagatagagagaccatcttcgcccggcagcatcagatccagcaccatcaggtggaaggattcacgggttaacagacgatccatctgttcggcgttcgccacgctacgaacctggaagccctgctcggtcagataacgctcgagcagcgcacgcaggcgcatgtcgtcatccacaaccagaatcttataattctcttgcattgtttgtactcccaaaggttcactgcaatagtcagtgcgtattctcaaaaaagcccggcgcgctcaccagctaaatctggtatatattccaggctaaattgttacaaagcatatttaacagcaggttaagtatacatttaatcataagacacagtatttatcctgtcggtattattacgcgctacaaattgtgcgcaacgacagacagtcagaaggttgaactcacgatgaaaacgccgctgatcacccgcgagggatatgaaaaactgaagcaggagatggactacctgtggcgccaggagcgtccggaagtgaccaaaaaggtgacctgggccgccagcctcggcgaccgcagcgagaacgcggactaccagtacaacaaaaagcgcctgcgggagatcgatcgccgggtccgctatctgaccaaatgtctggaacagttgaaaatcgtcgattactcgccgcaacaggaaggtaaagtcttcttcggcgcctgggtagagattgaaaacgatgaaggcgatatcaagcgctttcgcatcgtcggttacgatgaaatttttggccgcaaagactatatctccatcgactcgccgatggcgcgcgcactgttaaaaaaagaggttggcgatctggccatcgtcaacacgccggcgggcgaagccagctggtatgtcaacgagatcgaatacgttaaatagacaagaactttccgagagacgcccggcgcggctggtatttttagccgtcagtccgtataactagtccctgttttttgaccctaaagatgaattaaaagccatgatgaatgattcgctctgccgcattattgcgggtgaacttcaggccagagccgaacaggtagaagctgccgttcgcctgcttgatgaagggaacaccgtgccgtttattgcacgttatcgtaaagaagtcaccggcggtctggatgacacgcagctgcgtaatctggaaactcgcctcggctatctgcgcgaactcgaagaccgtcgtcaggcgatcctcaaatccatcgctgaacagggcaaactgaccgacgcgctggaaaaagccatcaacaccacgctcagcaaaaccgaactggaagatctctacctgccgtacaagccgaagcgccgtacacgcgggcagatcgctatcgaagccgggctcgaaccgctggctgacctgctgtggaacgaaccggcccacgatccggaagcggaggccgcaaaatatattgatgccgataagggcgtagccgacagcaaagcggccctggacggcgcgcgctatattctgatggagcggtttgccgaagacgccgcgctgctggcgaaggtccgtgactatctgtggaaaaacgcccacctggtctccaccgtcgtcagcggtaaagaagaggaaggcgccaaattccgcgactacttcgatcaccatgaaccgatcgccaccgtgccgtcgcatcgcgcgctggcgatgttccgcggtcgcaacgaaggcgtcctgcagctctctttaaacgctgacccgcagtttgacgagccgccgaaagagagccacggcgagcaaattattatcgaccacctgggcctgcgcctgaataacgccccggcggacagctggcgtaaaggcgtcgtcagctggacctggcggatcaaagtcctgatgcatctcgaaaccgagctgatgggcaccgtgcgcgaacgcgcggaggacgaggcaatcaacgtcttcgcccgcaacctgcacgatctgctgatggccgcgcccgccgggctgcgcgccaccatgggactcgatccgggcctgcgcaccggggtgaaagtggccgtcgtcgacgccaccggtaaactggtcgctaccgataccatctatccccacaccggccaggccgccaaagcggccgtcgccgtcgccgcgctgtgtgagaagtacaacgttgagctggtggccatcggcaacggtaccgcctcgcgtgaaaccgagcgtttcttcctcgacgtgcagaagcagttcccgaaggtcaccgcccagaaggtgatcgtcagcgaagccggggcttccgtttactccgcctccgagctggcggcgcaggagtttccggacctcgacgtgtcgctgcgcggcgcggtctccatcgcccgccgtctgcaggatcccctggccgagctggtgaaaatcgacccgaaatccattggcgtcggccagtatcagcacgacgtcagccagacccagctggcgcgtaagctggacgcggtggtggaagactgtgtgaacgccgtcggcgttgacctgaacaccgcctccgttccgctgctgacccgcgtcgccggcctgacccgcatgatggcgcagaacatcgtcgcctggcgcgacgagaatggtcagttccagaaccgccagcagctgctgaaagtcagccgtctggggccgaaagcctttgaacagtgcgcgggcttcctgcgtatcaaccacggcgacaacccgctggatgcctccaccgttcacccggaagcttacccggtggtcgaacgtattctggccgccacccagcaggcgctaaaagatctgatgggcaatagcagtgcgctgcgccacctgaaggcagtggacttcaccgatgagaagtttggcgtcccgacggtcaccgacattatcaaagagctggaaaaaccgggccgcgatccgcgtccggagtttaagaccgcgaagttcgccgatggtgtggagaccatgaatgacctgctgccgggaatgattctggaaggtgccgtcaccaacgtcaccaacttcggcgcgtttgttgatatcggcgttcatcaggacggactggtacacatttcgtcgctttctgaccggtttgttgaggatccgcacaccgtggtgaaagcgggcgacatcgtcaaggtcaaagtgatggaagttgatctgccgcgtaagcgtatcgccctgaccatgcgtctcgacgagcagccgggcgacagcaacgcccgccgcggcggtggtcaggagcgcccgcagggaaatcgcccggctgcgaaagccgccaaaccccgcggtcgcgaggcgcagcctgccggcaacagcgcgatgatggatgccctcgccgcagcgatgggtaaaaaacgctaaactctccctgcccctttttcaggggcagttttttttcatgaccaggccatcgccatcacgcgcaaaacagcttcagttgtttctgataacctgcttttattccacgcctgaaaggcagcgaaattaatattttcatttcgttaacttcagaaaccttaattaaacattagatcgccgaaataatatttcgcgcatttttgattacaggctgactttgcggcatatcaataaaaaggtgattttcactttaaaaatagcctgcagcgcatcatatgtattgatgataaaaaccattctcattatcatcgattacagaacgttttttcttttttcgttggctacggtccccggcgcaactgcctccaggcgtccggaaaattcttcttcggttagcgatagacaagtaggccctatgcaattcacacctgatagtgcgtggaaaattaccggtttttctcgcgatattagcccagcataccgtcagaaactgctctccctcggcatgctgcccggttcctcttttcatgtggttcgcgtggcgccgctcggcgatcctgttcatattgaaacccgacgcgtcagtctggtattacgcaaaaaagatctcgccttaatcgaactggaagcggttgcacaataacggctggcccggcacaagagtctgaaatatgcaaaaattaaccgttggtttaattggtaatcctaattccggcaagaccaccttatttaatcagctgaccggcgctcgccagcgcgtgggcaactgggctggggtgaccgttgagcgtaaagaggggattttcgccaccactgaccaccaggtcacgctggtcgacctcccgggaacctactccctgaccaccatctcctcgcagacctcgctggacgagcagattgcctgccactacatcctgagcggcgacgccgacatgctgattaacgtggtcgatgcctccaacctcgagcgcaacctctatctgacgctgcagctgctcgagctggggatcccctgcgtcgtcgcgctgaacatgctggatatcgccgaaaagcagaaggtgcggatcgatatcgacgccctcgccgcccgtctcggttgcccggtcattccgctggtatcgactcgcggacgggggatcgaagcgctgaagatcgccctcgaccgtcatcaggcgaacagcgatcttgagctggtccactatccgcagccgctgctgcgcgaagctgacctgctggcgcagcagatgtcagcgcagatcccgccccggcagcggcgctggctgggtctgcagatgctggagggcgatatctacagccgggcctatgccggcgacgccgccgataaactggatatcgccctggcgaatctcagcgacgagatcgacgacccggcgctgcacatcgctgacgcgcgctatcagaccatcgccgccatttgcgacgccgtcagcaataccctgaccgccgaaccaagccgcttcaccgccgcgatggacaaagtgatcctcaaccgcttcctcgggttgccgatttttctctttgtcatgtacttgatgttcctgctggcgatcaacatcggcggcgcgctgcagccgattttcgatgccggctcagtcgcgatctttgtgcatggcattcaatggctgggttacaccctgcacttcccggactggctgaccgtgttcctcgcccaggggatcggcggcggtatcaacaccgtgctgccgctggtgccgcagatcggcatgatgtatctgtttctctccttccttgaggactccggctacatggcgcgcgccgcctttgtgatggatcgcctgatgcaagccctcggcctgccggggaaatccttcgtcccgctgattgtcggttttggctgcaacgtgccgtcggtgatgggcgcccgcacccttgacgcgccgcgcgagcgtctgatgaccattatgatggcgccgtttatgtcctgcggcgcgcggctggcgatcttcgccgtcttcgcggccgccttctttgggcagaacggcgcgctggcggtcttctcgctctatgtgctgggcattgtgatggccatcctcaccggcctgatgttgaagcacaccattatgcgcggcgaagcctcgccgttcgtgatggagctgccggtgtaccacgtcccgcatatcaagagcctgattatccagacctggcagcgcctgaaaggctttgtgctgcgcgccgggaaggtgatcgtcatcgtcagcatcttcctcagcgcgctgaacagcttctcactgagcggtaaggtcgtcgacaacatcaacgactccgcgctggcctcggtgagccgggtcattacgccggtgtttaaaccgatcggcgtgcatgaagataactggcaggccaccgtcggcctgtttaccggcgcgatggcgaaagaggtggtagtgggtacgctgaacaccctctataccgccgaagatatccagaatgaggaattcaatccgcagaccttcagtctcggcgaagaactgctcgctgccgtcgatgagacatggcagggactgaaagacaccttcagcctcagcgtcctggccaaccccatcgaagccagcaaaggcgatggcgaaatggccaccggcgccatgggggtgatgggcagtaaatttggcagcgcagcggcggcatacagctacctgatcttcgtcctgctctatattccctgcatctcggtgatgggcgccatcgcccgcgaatcaagccgcggctggatgaccttctccatcctgtgggggctgaatatcgcctattcgctctcgacgctctattaccagaccgttagctttagcgatcacccgcgctacagtctggtatgtatcctggcggtagtgttgttcaacgtggtgctcttcggcctgttgcgccgggcgcgcagccgggtggacgtctcgctgctggccacgcgaaaaacgccggcctcctgctgttccagcccggctggcgattgccactaaggagggactgtggcgtcgttaatggaagtccgcgatatgctggccctgcagggccgcatggaggcgaaacagctcagtgctcgcctgcagacacctcagccgctgattgacgccatgcttgagcgaatggaagccatgggtaaggtggtccggatcagcgaaacgagcgagggctgcctctccggcagctgtaaaagttgccctgaagggaaagcggcgtgccggcaggagtggtgggcgctgcgatgaaaggagtcaggccaggtcgcgcaacgaggtaaaacgagtaagacagctatgaaaaacgggccagcaggcccgttttcttatgactggattatttataaacgtcagcgttcgcgtgtacggttttttcgtttttctgcccggcaatcaccacaaagtatttcccacccagctcatcggcttttttcgacagatcgcggcgggcgtccatcggcgatgtcgtcctggaggtcgtaatgctaccgaccttggtcagattcatcttcgccacgtcttctttttggatctctttcgcggcgaatgcgccgaaagagagggtgcctatcaccagagatgcaaccattcctgtaacaagtttcatagcctctactctccataaggttgttattgtaggtcacggtggcggattgaaataatcaaccaccgtaacaacctaagtattgctaggaatggcccttttaccatggcgcggcaaaaaaaattaccccagccgcgtcttcagcgccagcagcggctcgcagaaggccgcgggatgggaaacaaacggcgcatgcgcggccttatcgaagaggattgactcgctttccggccacaggtcatccagcaacgggacgatcttgcgcggcaccagtccatccagccggccatacagccgcagaaacggcatcggcagcctgaccagcgcctgacgcagatcgacggttctgaggatctccagtccgccattcagcgcctcggcggaaggcatcggcagcgagagcaccgcctgctttaacgcccgcgcatcctgacgcgcgctctctgtgcccatggtttgcagggcgaggaatcgctcgacggtgcgctggaaatcgtcgctcagctgctgctgaaatccggccagcacctcgggcttgatgccgggccagtcgtcacgagccgcgaaacagggggaagaggcaaccgtcaccagcgcctgcacgcgttccggacgcataatcgcgacctggctggccaccagcccgcccaggctccagcccagccacaccgcctgtggaggggcctgctccagcacccgctgcgccatcgcctccagcgacatcgccccaaacccgccgctgcggccatagcccggcagatccaccaggtggagggtaaaatgcgaagccagctgcggcgtgatgcaatcccatacctgagcgttcagcccccagccgtgcagcagcacaagatgacaatctccttcgccgattgtttgccaccagatgtcgttcatccgttaccgttctctttttactggacagaaggccaaatatgctaacagcacacagcttatgctggctatgccaaatgccgctggcagtcgcccgctgggggatctgctcccgctgcagccgcgccctgctcgcctgtcccccgctctgcccgcagtgcggcctgccggcggcggcatcccgtcacccctgcggccgctgcctgcaaaagccgcctccctggcatcggctggtggcggtcaatgactatcgcccgccgctgagcggtctggtgcagcagctgaagtttcaccatcgcccggagctgggggccgccctcgcgcgtctgctgctgcagcgccttctgcagcgtgacgatttgccgccagtagacgctctggtcggcgtgccgctatggcatcgccgtcgctggcgccggggttataatcagtgcgacgaactgtgccgaccgttagcccgctggcgaggatgcgtctggcatcgcgaaggcctgactcgccagcgagccggcgccgtccaacattcgctcaatgcccgccagcgcaggcagaacctgaaaaatgcctttcagcttgaatttgccgtgcagggactccatatcgctctggtggatgatgtcgtcacgaccggcagcaccgtcgccgagatatcccgcctgcttttgcgaaacggcgccgcgacggttcaggtatggtgtttgtgccgtaccttgtagacccccgctgatgggcgtattataacccagtaaaatagtcaactattaggccaacgctatgatccgtatttccgatgctgcacaagcgcactttgccaaactgctggcaaatcaggaagaagggacgcaaattcgcgtatttgtgattaatcccggcaccccaaacgctgagtgcggcgtatcctactgcccaccggatgcggtggaagacaccgacacggcgctgaaatttgaacagctgaccgcctatgtcgatgagctcagcgcgccctatctggaagacgctgaaattgatttcgtcactgaccagctcggctcgcagctgacgctgaaagcgccgaacgccaaaatgcgcaaagtctctgacgatgccccgctgatggagcgcgtcgagtacctgctgcagtcgcagattaacccgcagctggcaggccacggcggccgcgtatcgctgatggagatcaccgacgacggtctggctatcctgcagttcggcggcggatgcaacggctgctcgatggtcgacgtgaccctgaaagaaggtattgaaaaacagctgctgaacgagtttccggagctgaaaggggttcgcgatctgaccgagcaccagcgcggcgagcactcctactactaaacccttcctccggcggcagcctgccgccggatcgccgtgatccattctgtgttaccgcgcaacatctcccgctaaatgaccggcaaaaaccggggaaagagtatgacttaagtctcatatttaacattttcccccgtcaggtgattctcaaccctcacatgttacccgtatcatccatttcaggcgccaccggcaaaaaaatagccagctatcctttctctgggtaaggataatgcaagcgtttacggtgccagactattttgctccctgacggagcggatgctctacaggttcgaactttgacgttacccataacaaattaaggccaggtaaatcatgccattagtcatcgttgctatcggggttgccctgttgttgctgttaatgatccgtttcaaaatgaacggcttcattgcgctggttctggtggcgctcgccgtcggattaatgcagggtatgccactggataaagtgatcgtctccatcaaaaacggcgttggcggcacccttggcagcctcgcgctgatcatgggcttcggcgctatgctcggtaagctgctggcagactgcggcggcgcccagcgtatcgccaccacgcttatcaataagttcggtaagaagcatattcagtgggcggtggtcctgaccggcttcaccgttggcttcgccctgttctatgaagtgggcttcgtgctgatgctgccgctggtgttcaccatcgccgcctcggcccgtattccgttgctgtacgtcggcgtaccgatggcagccgcgctctccgtcacccacggcttcctgccgccgcatccgggtccgaccgcgatcgccaccatcttccatgccgatatgggcaaaacgctgctctacggcaccattctggctatcccgacggttatcctggcgggaccggtgtttgcgcgcttcctgaaagggatagataagccgatcccggaaggcctgcataacccgaaagtgttcactgaagaagagatgccaggctttggcgtcagcgtctggacctcgctggttccggtgatcctgatggcgatgcgcgccgtggctgagatgatcctgccgaaaggccacgccttcctgccaattgccgagttcttcggcgacccggtgatggccaccctgattgcggtactgattgccctgttcaccttcggtttgaaccgcggccgctccatggagcagatcaacgataccctgacctcttcgattaaaatcatcgccatgatgctgttgatcatcggcggcggcggcgccttcaagcaggtgctggtggatagcggcatggataaatacatcgcctctatcatgcacgaatcgaacatgtctccgctgtttatggcgtggtctatcgccgcggtgctgcgtatcgcgctgggttcggcgaccgtggccgccatcaccgcgggcgggatcgccgcgccgctgatcgccaccaccggcgtcagcccggagctgatggttatcgccgttggctccggcagcgttatcttctcccatgttaacgatccgggcttctggctgttcaaagagtactttaacctgaccatcggcgagaccatcaagtcctggtcggtgctggaaaccattatctcagtctgcggcctggtgggctgtctgctgctggggatggtggtgtaaggtcactcccgccacagaaaaaggccggtccgcgtgaagcgggccggccttttttatcggacatgctcttcgccgcgcagaggagcgcgcggcaggaagttatcaggaggcggctttcttgctcgccgccttgcgccgtttatccagatccttaatcagcttattgacccgttcatcggcaaacatctgctccagggtgacggacagcttccggcgccagttcgggtactcggtgctggtgcccggaatgttaaccggcgtcgccatctccagccagtcttccggctgcaggcccagcagggcgctgttgctgtcggcaatataacgctgcatcccccggttgaggatccccgtcatgctcatcagcgaggccttatggccggcgcgcttgggcagacagccgtacttatgcagcgcgtccagcagcccttgcttcgccagctcgcggtcctggtacagtccgcgcagcaccacctcatcaggatagaggcccagcgctttacctaacgtcagatcgccgctttcccagtagccgcgaagagtgggcaggtcgtgcgtcgtcgccacagccattgattgctccgggtacagcgccggcgcgcggaacgttttctctgcatcactctcaaaatagagcaccttataagaatagacgccgctgttgcgtaacttgctgacgatctccaccggtaccgtgcccagatcttcaccgatcaccatgcagcgatgacgctggctttccagcgccagaagcgacagcagatcgtcgaccggatactgaacgtaagcgccatggtcggcggtttcaccatacgggatccaccacagacgcagcacagacatcacgtgatcgatgcgcaacgcgccgcagttctgcatattagcgcgcagcaggtcgataaacggctcataggcgcgggcggcaatgatatgcggatccatcggcggcaggccccagttctggcccagcgggcccagaatatccggcggcgcgcctacggatgctttcaggcagtacagttcacgatcgcaccaggtttccgacccgccctcggcgacgcccaccgccaggtcgcggtagaggccgatcggcatgccgtcacgctggctggtttcccagcaggcggcaaactgactccaggccagccactgcagccaaagatagaaactgacgtcatcctcatgctcgacgcagaaggctttcacctccgggctgtcgatatcctgaaaggccttcggccaggccggccagccccagcgcagcgggtcctgttgtacctgccaggcgtgcagcgcatcgaaagccgcctgccagtagaggctttccccttcgcgcagaacaaactcgcggaacgctgccatctgctcatcttcacgacgagagaattgtttccacgccatacgcagcgcggtcattttcagcgtagtgacggcggtataatccacgtcgtccgtttcccgcgccgcctgcagtgcctgctgcgttgccggagactgccaccacgcctgcgcctcttcgctacgctggaaatcttcaaccgcgttgacgtcgatataaataacgttcagccagcgacgtgaagacgggctataggggctggcgctctccgggttcgccggatagagggcatgaatcgggttaaggccaataaacgacccgccgcggcgggcgatttccggcagcatggcccgcagatcgccaaaatcgccgatcccccagtttttctcggagcgcagggtatacagctgcacgcaggtgccccacagctttttcccctctttcagcggctgcggctcatagcagcgggctggcgcgacgatagtccggcagtgccagcgctccccctcctgggtgagggtcagggagtggtacccctccggcagtttggccggcagcggcagcgtctcgccgccgcgggttttcccttgatactgcttaccatcctcagtagtcaggatccactgatactcaccgcgtcctgccaccggcagcgacatttttttgccgtgagtgaaaattttcacgttcggcagcgggttaaccgccactttcgtggcggcggtagagcgatgcatcgcatccagcaggcgctgtttggtgacagccgcgatagactgcggcttgccgtgcgcgttgatatagctggggctgatgcccgccgccagcgcggcattatcgaggcgtttactctccataggccttcctttagcgtttcgcctgccagatacgttgctgataatcgcggatcgagcggtcggagctgaacatgccgcagcgcgcggtgttgaggatagccgcgcgggtccaggcctcctcgtcgcgatacagctcatctacccgtttttgcgccgctacgtaggcttcgaaatcggccagcaccaggtacggatcgccgccctgcagcaggctgtgcagcatctgatcgaaggcatgcttgtcgccgttgctgtaggtgccgttctccagctccttaagcaccgcatcgagcaacttgtcttttttacgccatttcagcggatcgtagcctttcgctttcagggctttcacctcttcaaccgtgtggccgaagataaagatgttctcctcgcccacctgctcagcgatttccacgttagcgccatccagcgtcccgacggtcagcgcgccgttcagcgccagcttcatgttgccggtgccagaggcttctttacccgcggtggagatctgctcggagatatccgccgccgggatcagtttttctgctgccgatacacaatagtccggcaggaagaccaccttcagcttatcgccgactttcgggtcgttgttgatcgcttccgctaccttattgatggcaaaaataatgtttttcgccagatagtagcccggcgccgctttcgcgccgaacaggaaaacgcgcggtacgcggtcggactgcgggttttcgcggatctctttgtacagcgcaaggatatgcagcaggttaaggtgctgacgcttatactcgtgcagacgtttgatctggatatcgaagatcgcctgcgggttgatctcaatcccggtacgctgcttcacaaactcagccagatgaactttgttggcctgcttgatatcgcgataagtctgacggaacgccgcatcgtcagcatatttttccaggttgatcagctggtcgaggtcattggcccactcttttttcagcgtctcatccagcagcgaggccagcgccgggttgcactgcttgatccagcggcgcggcgtgatgccgttggtcacgttatggaatttgttcggccacagctggttatattccgggaacagatcttttaccaccagatccgagtgcagcgccgccacgccgttgacagcaaagccgcccaccacgcacatgttggccatccgaacctgtttgtcatgcaccaccgccagcttcgcccagacctgcttatcgcccggccaggttttgtccaccagctgtttaaagcggtcgttgatctctttaatgatctgcatatggcgcggcagcagcgcttttaccagcttctcatcccagcattccaacgcttccggcatcagggtgtggttggtgtaagcaaaggttttgctggtgatcgcccaggcgtcgtcccagctcagctggtgctcgtcgatcagcacgcgcagcagctccgggatggcgatggtcgggtgcgtatcgttcagctggatcacttcgtaatccgccagttcggccagcttgcggcctgccagatgatgacggcgcaggatatcggccactgagcaggcacactggaagtactgctgcatcaggcgcagttttttaccggcctgatggttgtcgttcgggtacagcaccttggtcagtttttccgcgtcgatgccctgctgctcggcgcgcaggaaatcgccatcgttgaatttggtcaggttgaacggatgagcgtgtttggcctgccacagacgcagcggctgggcgacgttgttgcgatagccaagcaccggcaggtcccaggcttcgccggtaatgacgaacgccggctgccattcgccgtttttgctgactttcccgccgatacctacctggacatccagcgcttcgttatgacggaaccacgggtagctgctgcgcccccagtcgtcaggggcttccatctgctggccatcgtcaaatgactggcggaacaggccatactggtagttgagaccgtaaccggtcgccgactgccccaccgtcgccatggagtcgaggaagcaggctgccagacgtcccaggccaccgttacccagcgccgggtcagtctcttcttccagcagatcggtgaggttgacatcgtagcctttcagcgcgtcgctgacgccctcgtaccagcccaggttgagcaggttgttgccggtcagacgaccaatcagaaactccattgagatgtagttaacgtgacgctgtccttgcgccggtttcgctaccggctgcgccgccaggagttccgccaacgctccgctgactgcgcgccaccattgacgctgtgtcatctcggaagcggactgtaaaccaaaatgctgccactgacgcgtcagtgcagcctgaaactgagctttgttaaatgtagtctgtgacataatgagatccgggtcctttactaaaacgatggcgctagtgtgccgacctcccgattcatcgtcctcatcctgacggggattagacagggaggagtggcggggatgagcgaaaagtgtgatcctgaacactatagtgtgggcgagaaggcaaaaatatgctgtaaaaatcaccgcgatatgacaattgagaggttacctccggtagctaaaaatttgttacaggccaatacgcgtaaaaaatcttccagttcctcgccacgttattaacaaaataaatagaggcccctgaagaaataagcacctttcatcgcattgacccgcaaaaaagattacttctaagaaatcgctgacaataatttaataaaaacaaacaactactcttagcgtaaaataaatccacccacactccgccagctaccgcctgaaaaccgcggccgaccagtcctgcctgcgattttttcccattctcagccaatgtcaaaatttgtgacatagagcaaattcaagagcataaacttcggacataacttgcaataaatttcataatcaccgaccttattagatattaattacgaagcgcaaaaaaaatcgcaacctctctcttgcacagcgaaatgtagaactatgttgattccgtccaaattaagtcgtccggtccgccttgaacacactgtggttcgtgagcgcttactggcgaaactttccggcgcgaacaattatcgtctcgtgctgatcaccagtcctgccgggtacggtaagacaacgctcatttctcagtgggccgcgggtaaaaacgatcttgggtggttttcgctggacgaaggcgacaaccagcaggagcgttttgccagctatctgatcgcggcgattcagcaggctaccggcaaccactgcgcggccagtgaagcgatggtgcaaaaacgccagtacgccagtctctcctctctttttgcgcagctgtttattgaacttgccgactggcagcgcccgctgtatctcgtcattgatgattaccatctgatcaataatccggtgatccatgacgcgatgcgctttttcctgcgccatcagccggagaatatgaccctggtggtcctgtcgcgtaacctgccgcagctgggcattgccaatctgcgcgtccgcgatcagcttctggagattggcagtcagcagctggcctttacccaccaggaggcgaaacaatttttcgactgtcgtctgacatcgcctatcgaagccgacgacagtagccggctgtgcgacgatgtcgccgggtgggccaccgcgctacaactcatcgccctctccgcccgccagaataactcctccgcccaacactccgcccgccgcttcgccgggattaacgccagccatctgtcggattatctggtggatgaagtgctggataacgttgacgcccgcacgcgcaactttttgctgaagagttctctgctgcgctcaatgaacgacgcgttaatcgtgcgcgtcaccggcgaagagaatggccagatgcagctggaggagatcgaacgccaggggctgttcctgcagcggatggatgattccggcgaatggttccgctatcacccgctgtttggcagcttcctgcgccagcgctgtcagtgggagctggcggttgaactaccggagatccaccgcgccgcggcggaaagctggatggcgcaaggtttccccagcgaggccatccaccatgcgctggcggccggcgatgccaaaatgctgcgcgatatcttgctcaatcatgcctggggcatgtttaaccatagcgagctggggctactggagcagtcgctggcggcgctgccatggtccaatctgctggaaaatccgcgcctgatcctgctccaggcctggctgatgcagagccagcatcgctacagcgaagtcaataccctgctggcgcgcgccgagcaggagatgagtgtggaaatggacaccgcgatgcatggcgacttcaacgcgctgcgcgcgcaggtggcgattaacgatggcgaccaggacgaggcggaacgtctgtcaatggtggccctggaagagctgccgctggccaactattacagccgcatcgtcgccacatcggtgcatggcgaagttctccattgtaaggggaagctgaccaaatccctcgccgtgatgcagcagaccgaacagatggcccgccgtcacgacgtatggcattacgccctgtggagcatcattcagcaaagcgaaatcctcttcgcccagggcttcctgcaggccgcctgggagagccaggagaaagccttccagctggtacgcgaacagcatcttgagcagttgccgatgcatgagttcctgctgcgcatccgttctcagctgctgtgggcatgggcgcgcctcgacgaggctgaagcttgcgcccgccaggggatggacgtgctatccacctatcagccgcagcagcagctgcagtgcctggcgctgatggtccagtgctcactggcgcgcggcgatctggataatgcccgcagccacctgaaccggctggaaaacctgctcggtaatggtcactatcacagcgactgggtctccaacgccgataaggtgcgagtgatctactggcagatgaccggtgataaaaccgcggcggccaactggctgcgccagacgccaaagccggagttcgccaacaaccacttcctgcagagccagtggcgcaacattgcccgggcgcagatcctgctgggcgacttcgaaccggcggaaatggtgctggaagagctgaacgaaaatgcgcgttcgctgcgtttgatgagcgatctcaaccgcaacctgctgctgctcaaccagctgtactggcagtcaggacgcaagagcgaagcgcagaaagccctgctggaagccctgacgctcgccaaccgcaccggttttatcaaccactttgtgattgaaggcgaggcgatggcccagcagctgcgccagctgatccagttgaacacgttgccggagctggagcagcatcgcgcccagcgtattctgcgcgacatcaaccagcatcatcgccacaaattcgcccactttgacgaagggttcgtcgagcgactgctgaatcatccggaggtgccggagcttatccgcaccagcccgctgacccagcgcgagtggcaggtgcttggcttaatctattccggttacagcaacgagcagattgccggcgagcttgacgtggcggccaccaccatcaagacccacattcgcaacctgtatcagaaactgggcgtcgcccaccggcaggacgcggtacagcatgcccagcagttacttaagatgatgggatacggcgtctgacgacgccgttgccgtttagcacagctccagctgaaggttgttatcagtgatcaccttcagcacgccggccggcggcagcacgtcggtatagaccgcatcgaccatactgatgctgcccatgttgaccatcgcattgcggccaaacttggtatggtccaccaccagcatcacgtggcgtgaattctcaatgatcgcccgcttggtgcgcacttcatgataatcaaactccagcagcgagccatcgctgtctacgccgctgatgccgagaatgccgaagtcgaggcggaactgcgagataaagtcgagggtggcttccccgatgatcccgccgtcccggctacgcagttcgccgccggcgagaataatgcggaagtcctctttcaccatcagcgtgttggcgacgttaaggttattggtcacaatccgcagatcgttgtgatcgagcagggcgtgcgccaccgcttccggcgtggtgccgatatcaataaacagcgtcgccccgtccgggatctcgctggccacccgccgggcgatacgctctttctccgccgtctgggtcgctttgcgatcgtgccaggaggtgttcaccgagctggagggcagcgccgcgccgccgtgatggcggaggatcattttctgttcggctaaatcgttcaggtcgcggcggatggtctgcgggcttaccgcgaactgctcaaccagctcttccgtgctgacgtaaccctgtttttttaccagctcgataatggcgtcatgacgttgtgtttgtttcatgaaatatccctggaaaaatatcgcctacccgacccctgtcggtaagtctttatgcgcgttttcgcccatgtaaggtatcaacaaacgccatcgccaggccggtcgccagaccagccacgtgcgcgccgttggcgatcgccatgccgaaaacgtcaaaccagccagcaattaaccacactaaagagaagagtatcaacccgcgctgcagataaataccgctctgcggatcgcgctcgccccgtagccagacgtagcccatcagcgcgtagaccacgcccgacaagccaccaaaccacgggccgctaaactggtgctgcacgaagccgctcagcagagcgctgatgacggtgatcaccaccagcttgccgctgccgatgcgcttttccaccgcgccgccaagataccaccaccatagcaggttaaagagaatatgcatcagcgagaaatgcatgaaagcatggctgaaatagcgccaggcttcgaactgcagcgaaggatcgtagggccaggccagccaaatcatcaccggctgatcgcccagcagattttgcaggatgaacaccgcgatgcagatcagcagaatcgcccaggtgaacggaccggcgttatgccgcagcgtggcaaagaaaggaaagcgctgatagcgcaacccgctattggtctgtccggactgccagcttgccgccagatagcgcgggtccgccgggttttcgagaaaacgcgccagctcagccctgacgcgcccggcctgactctcatcagccagccagacgtcgctctgggtatgctgctggatggtcaggataatcccctgcgtcgccatataatcgacaaacgcctgggccacccgcgggttggcaaaagaggtaatcattaacatgcagcgaatcgcttattccacacaaagggggatagtatacctgccagtcgttaaaacgtcccgcgcgccacttccgccgggaaatggcgatgccaggcgtcgaacccgccgtcaacgctatagaccttatcaaacccctgctgcagcagatactgcgcggcgcccttgctgctgttgccgtgatagcacatcaccatcaccgccgtgtcaaagtcgttgtcacgcataaacgcgcccagcgtatcgttggtcagatgaaacgcgcccggcgtatgacccatcgcatagctttgcggatcgcggatatcgaccagtaccgccgtctgctgatgcagtttctggtgcgcttcttcaacattgatgcattcaaactgttccatgattctcttctctttcttgtcatgacgggcgatggccggcccaattttaccctgtagtgtaccgtcaggcggtaaagaaacgccaatatgttacacccatcacttcaaaatgtttttttgatgttaccaaaagcgcgtttgtttgctatagtgagcgatatcgagcatttatgagcttaaacgaaagtgtgagagggtaagaacgtggaaaccaaagatctgattgtgataggcggaggcatcaacggtgccggtatcgcggcagatgccgccgggcgtggtttatccgtactgatgctggaagcgcgcgatctcgcctgcgccacctccagcgccagttccaaactgatccacggcgggctacgctacctcgaacactatgagttccgtctggtcagcgaagcgctggccgagcgtgaagtgctgttaaaaatggccccgcatatcgccttcccgatgcgctttcgcctaccgcatcgcccgcatctgcgcccggcatggatgatccgtatcggcttgtttatgtacgatcatctgggcaaacgcaccagcctcccgggatccaccgggttgcgttttggcgcagaatcggtacttaaaccggaaattgtgcgcggtttcgaatattccgactgctgggtcgacgatgcccgcctggtgctggccaacgcgcagatggtcgtccgcaaaggcggcgaagtgcgtacccgcacccgcgctatctcggcgaaacgtgagaatggcctgtgggtggtggaagcggaagatattgataacggtgagaagtttacctggaaggcgcgcggcctggtcaatgccaccggcccatgggtcaaacagttcttcgacgaagggatgcatctgcgctcgccttacggcatccgtctgatcaagggcagccacatcgtggtgccgcgggtgcatacccagaaacaggcttatattctgcagaacgaagataaacgcatagtgtttgttattccgtggatggatgagttctctatcatcggcacgacggacgtcgagtataagggcgatccgaaagcggtggccattgatgataaagagatcaactatctgctgaacgtctataacgcgcactttaaaaagaccctcagccgggacgatatcgtctggacctactccggcgtccgtccgctgtgcgacgacgagtcggattcgccgcaggccattacccgcgactataccctggatattcacgatgagaacggtcaggcgccgctgctgtccgtcttcggcggcaagctgaccacctatcgcaaactggccgagcatgcactggaaaaactgaccccctattacaaagggatcggcccggcatggaccaaaaccgcggtgctccccggcggcgatatcggcggcgaccgcgacgactacgcggcaaaactgcgccgtcgcttcccgttcatcagtgaatcactggcccgccattatgcccgcacctacgggagcaacagcgagtggatcctgaaggaagccagcgcactgagcgatctcggggaagatttcggccacgagttttatgaagccgagctgaaatatctggttgagcacgagtgggtgcgcagcctggatgacgccatctggcgtcgaaccaaacagggtatgtggctgactgccgagcagcaggcgcgcatcagcgaatggctggcgcagcatgcgggaaagtctgaactgtcgttagcgtcctgacatcgcgtggcgccaggagagaaatacccgggctatggcttgcgcttggcccggatacctgttcacaaattaaacgagactttttttccagtcggcaatgtgacatttatactgagttctccccccaatgccgcaatgtagcgttttagggtcgaaagccgagggtcgttatcagtctgttccattttagcgatcgttggctgctttacccccatagccgcagccatctctgtttgcgacatttgcaactcttctcgaagcaagtttaaagcgacagactggcgtatctctgccgctttcgctgcaatacgctgctggctttcaggactctgtttcgccatgagttcttttagcgtggccattatcgctccttagtcaggtgttggctgaattctctgtcagccagagtattcatctctttgtaaaaacgtttctcattcatgccatccttattgcccgcacataaaacgatagctttccgcagaggatcaaaagcaaaaaaggcgcggatggggagcccatgatgctgaacccggagttctttcatattctgaaacgttgaatctttcaccgtatcaacatacgggcgcccaagctgcggagcaaactcagacaagatgagcatcgtggccaacatatcctcttttaaagctctactttgtaattcgaaccaggcatcaaacgtatccgtcgtttctacatcccacataggctatgaacgtaaacttattgagcatttatcgtactgctggcgaattcacgtcaatagtatattcccgcaatagcctgaatcctccccggcacttttccgaataaaacgttcgccacacaacacaacggggccaaatggccccgttgtgttgtgtggtgttgcattgactggcttacagccttaccgggtcgatatgccagatatatttcgcgtactcctggatcgtccggtcagaagagaagtagcccatgttggcaatattcaacatcgccttataggcccactcttccgggttttgatacagctcgtcgacgcgatcctggcagtccacatagctacgatagtccgccagaacctggtagtggtcgccaaagttaatcagcgaatccagcaggtcgcggtagcgccccggttctgccgggctgaagacgccggtaccgatctgcgtcagcgcctggtggagctcttcatcctgctcgtaatattcgcgtggtttatagccgctgcgacgtagctcctccacctcttccgcggtgttgccgaagataaagatattctcttcgcccacgtgctcctgcatctccacgtttgccccatcaagggtgccgatagtcagcgcgccgttaagggcaaacttcatattactggtgccggaagcttcagtgcctgcgagggagatctgttccgacaggtctgccgccggaatgatcagctgcgccaggctaacgctgtagttggggataaagacgaccttcagcttgtcgccaatctgcggatcgttattaatcaccgccgccacatcgttgatcaggtgaataatgtgcttggccatatagtaggccgaggccgccttaccggcgaaaatattcacccgcggcacccactcggcctgcggatcggccttgatccggttatagcgggtgatgacgtgcagcacattcattagctgccgtttgtattcatggatacgtttgatctgcacatcaaacagcgccttcggattgaccaccacattgagctgttgagcaatatagctggccagccgctgtttgttctcaaacttggcctgacggaccgcctgattgaccatcgggtagtcgatatgctgtttcagctcatcaagctgactcagatcggtccgccaggtgcggccgatatgctcatccagcactttcgacagcggcgggttggccagcgccagccagcggcgcggcgtcacaccgttggtcacgttgataaagcgcattgggaagattttggcgaattcggcaaacagtgactccaccatcagtcgggaatgcagctcggacaccccgttgaccttgtggctgaccactaccgccagccaggccatccgcacacggcggccgttagactcgtcgataatcgaggtgcggctgaggaggtcggtatcgttcggatactgctcctgcaaggtcttgaggaaatagtcgttaatctcgaagataatctgcagatggcgcggcagaattttacccagcatatccaccggccaggtctcgagcgcttcgctcatcagggtgtggttggtataggagaagacctgacaggtcacctcgaacgcctcgtcccagctgaacttatgttcgtcaataagcagacgcatcagctccggtatcgacagcaccgggtgggtgtcattcaggtgaatggcaatcttgtccgccaggttgtcataggtcttatgcaacatataatggcgactcaggatatcctgcaccgtggccgacacgaggaaatactcctggcgcaggcgcagctcgcggccggagtaggtcgagtcgtccggatagagcacgcgggagacgttttcggagtggtttttatcctctaccgcggcgaagtagtcgccctggttgaatttaccgaggttaatttcgctactggcctgcgcgctccacagacgcagcgtgttggtggcgtcggtgtcaaagccggggatgatctggtcgtaggcttccgcaatgatctcctccgtctcaatccagcgggttttctttccttcctgctgaatgcggccgccgaagcgcactttatagcgggtgttgtggcgctcaaactcccacgggttaccgtactccagccagtagtcaggagactctttttgccggccatcgacaatattctgtttaaacatcccgtagtcgtagcggatgccgtaaccgcgtcccggcagacccagcgccgccagggagtcaaggaagcaagccgccaggcggcccagaccgccgttgccaagcccggggtcattctcttcatcgatcagctcttcgagatcgagccccatctccgccagcgcgctgctcacatcgtcataaatgcccagcgacagcagcgcattcgagagggtgcggccgatcagaaactccatcgacagatagtacacctggcgcacttcctgggagagctgcgcgcggttggagcgcagccagcgctccaccatgcgatcgcgaacggcaaacagcgtggcgttaagccattcatgcttgttggcgatggccggatctttaccgatgataaacatcagtttataggcaatagaatgctttaacgcctcaacgctcagcgtcggtgatgcatagctaaagggtacattcataacaatgactccagtggttacatcaagcgttgataaagttcgcgataggagttcgcggcaacctgccagctaaaatccatattcatcgcctgacgctgcacgtagcgccagagcgacgggcgcgaccagaggacaaaggcgcgacggatagcgcgcagcaatgacagcgcattgctgtcctcaaagacaaaccctgtcgccagaccatcggccagattctccagcgaactgtcagcgacggtgtccgccagaccgccggtgcggcgcaccagcggcagcgtcccgtacttcagaccatacagctgggtcaggccgcagggttcaaagcgactcgggaccagaatgacgtcggcgccgcccataatgcggtgggagaaggcctcatggtagccaatctgcacacccactttgcccgggtgttcggcggcggcggcgaggaaaccttcctgcagcaccggatcgccggcgcccagtagcgccagctggccgccctgctcaagcagacccggcagcgcttcaagcaccaggtccagccctttctggctggtaagacggctgacgacggcaaacaacggcgctttatcatcgaccttcaggcccatggcaatctgcagctgacgcttgttctccgccttctcctccagcgtgtcgcgatcgtagcgcatcggcagcagcagatcgttttgcgggctccagataccgtcgtcaacgccgttgagaattcccgacagccggccttcatgatggcgctggcgcagcagcccctccatgccgtaggcgtactgcggctcggtgatctcgcgcgcgtaggtcgggctcaccgccgtaatatggtcggcgtagtagaggccggccttgagaaacgagatctgcccgttaaactcgaggccatgcatgttatagaacgaccaaggcagctcaatgtcattcatatgccaggagtaaaacatcccctggtacgccaggttgtgcacggtaaacaccgatttagccgggcgtccgcgcgccgccaggtaggccggcgtcaggccggcgtgccagtcatgggcatgcaccacatccgggcgccagaacggatccagtccgctggccatttcacttcccacccagcccagcagcgcaaagcgcaggacgttgtcgggataagcgtgctggttggtatcgtggtaagggctccccggacggtcatagagatgcggggcgtctatcaggtagatccccacgccgttaaagtggccgtacagcagcgtgatccgcccggcgaaggtatcccggcgggtcaccacctgggcatccaccacgccgcgacggatatcgggaaacgccggcaacagcacgcgcgtatcgataccctccgcgatttgcgccgccggcagtgcgccgatgacgtccgccagaccgcccgtctttaacagcgggaacatctcagaacatacatgtaagacctgcattagcgctcctgtttgtgccctaatttccgcagcatgtcgcgggtcaccagcacgataccttcctctgagcgatagaagcggcgtgcatcctcttccgcattctcaccaatcaccattccttccgggataacacaggcgcggtcaatcacgcagcgacgcaggcggcatgagcgccccacccagacatctggcaacaagactgccgaatcaatgttacagaacgaattcacccgcacgcgcgggaacagcaccgactgcaccaccaccgacccggagataatgcaccccccggaaaccagcgagttcaaggtcatgccgtggctaccggagcggtcctgcacgaacttcgccggcggcagcgattccatatgggtgcggatcggccagttctggtcgtacatatccagctccggcgtgactgacgccagatcgaggttagccttccagtaggcttccagcgtccccacgtcgcgccagtaaggttcggcgttcgggtcggactgcacgcaggagagcgggaaaggatgtgcataagccatgccagcttcggtgatcttcggaatgatgtctttaccgaaatcgtggctggagttctcgttgcgatcgtcttcttccagcagctcataaagataggcggcgtcaaagacataaatgcccatgctggccagcgatttggtcgggtcggtcggcatcgccggcgggttggcgggtttctcgacaaactcaatgattttttcgttttcgtcgaccgccatgacgccgaaggcggatgcctcttcaatgggcaccggcatgcaggccacggtgcaacgcgcccctttttcgacatggtcgatcagcatgcgcgagtagtcctgcttataaatatggtcgcccgcgaggatcaccacgtactcggccttgtagcggctgatgatatccaggttctgcgtcaccgcatccgccgtgccgcgataccaattttcgccatgcacgcgctgctgagccggcagcagatcgacaaactcgttcatctcttcgctgaagaacgaccagccgcgctggatgtgctgcaccagcgtgtgcgactgatactgggtaataacgccgatgcggcggatccctgagttaatgcagttagataatgcgaaatcgataatacggaacttgccgccaaagtgaacggcaggtttcgcacgcttaatggtgagatccttcagccgggtgccacgcccgcccgcgaggatcaacgccacggatttgatgggtaattgacgcgccagcatcagcggatcgtttttttcaagcctaaccatgattaactcctttttacacccccgctttccagctcatcccgccgcgccgccgccacgggtccaaccgaaagcttcagggcttacgacctttgaaatacgcacactccgtgcgcgggcccatgccagacagccatgatgaccggattatcctctccggcgaatggaggaacggcgcgccattccccctcgggtaaaaccatatccaccacctctgcggtggcgttcagcgtgagcagccagcgatccgacaactggatctgcatacacgcggccccctgctgccactccgcggcagtcaggggctgggcgttgcgattaagccagcggacgttgccatccccctcctgccaccagcggttgcgggtgagcgccggaatacggcgccgcaggtggatcagcgccgcggtaaaggcggttaatcccgggttcgcctggcgccagtccagccacgtcagggcgttgtcctggcagtaagcattattgttaccgtgctggctgtggccctgttcatcgcccgccagcagcattggcgtcccctgagccagcagcagcgtcgtcagcagcgcatgcgcgctggcgcgccgccgttcaatcaccgcaaaattcgcttctaatccttctataccatgattgttgctgtagttattgttagtcccatcgcgattctcctccccgtttgcctcattgtgtttctgattgaaacaaacgcagtcgcgcagcgtgaagccatcgtgggccgtcaccaggttgaccgtcgccgatggcggcttgccatcgcgggcaaagagatcgctggaggccgcgaaacgttgcgcgaaatcccccagggagacattttgctgtagccagaagcgtcgggcgctatcgcgaaaatggtcattccattcagcgaacagcggtgggaaattacccacctgatagccgcccggaccgatatcccagggttccgcaatcagtttcacctgcgacagcacgctgtcgcggcggatagcctcgaacagcggcgcatcctggcggaattccggcgtccgccccatcactgaggcgaggtcgaagcgaaagccgtcgacatggcactcatccacccaaaagcgcaaacactggcgcgcccactccaccacgccggggtggctaagattgagcgtattaccgcacccggtccagttgtgataatcgctatcctcccttacccaataatagctacggttgtcgattccgcgcagggagacggtgggcccttcgagatcgatttccgcactatggttgagcacgatatccagaatcacttcgataccggcggcgtgcagcgccttaaccgcatcgcgaaactcatccagggcgcgatccgggtcgctggcgtagcgcggatccagcgcgaaccacgccaacgggttgtagccccagtagttgcttaaccccatccgctgcagtcgcggctcgctggcgaactgcgccaccggcaacagctcaagggcgctgatgcccagcgatttgaagtaagcgatcatcgccgggtggcccagcgctttataggttccgcgaatggcttccggtagctgcggattaagcaaggtgagccctttcacgtgcgcttcataaatcaccgtttccccccatggggtacgcggcggtttatcgccacgccagtcatagcgcagatccaccacctgcgattttggcgcgaccgcggcgctgtcgcggcgatcgggctgccacatgccgccgtgcaggcgctcatcgtcaggcagatcgccctcgacccggtgggcgctgggatcgatcaacagcttggccgggttaaagcggtgcccctgcgccgggtcccagggaccatgtacccgatagccgtagcgcaggcccggcccggcggcggccagccagccgtgccagatgtcgccgctgcgcgccgggagatcgaagcgttgctcgttgccctgctcgtcgaatacgcacagctccacccgctccgcatgggcggagaagagggcgaaattcacccccttgccgtcatagctggcgcccaatggcgcaggtttgcctgccgcgagtgaggtcattgcgcctcccggaccagccagatcgtcgccagcgggggcagggtcagcgatagcgaatgttcgcggccatgactggcgatagcgtcgctttccaccacgccgccattgccctgattgctgccgtgatagtgcatggagtcggtatttagcgcctcgcgccagcggcccggctggttaatgccgaagcggtagtcgtggcgcggcaccggcgtgaagttgctggcgacgataatctcgttgcccgcccggtcacggcgtacaaagacaaacaccgagcgctcatggtcgtcgaccaccagccattcgaagccgtaggggtcaaaatccagctcgtgcagcgctttatgatgacggtaggtatggttcaggtcgcgcaccagccgctggacgccgtggtgccagttgtcgccgccctccagcagatgccagtcgaggctaacgtcatggttccactcgcggccctgagcgaactcattgcccataaacagcagctttttccccgggaaggcgaacagccagccgtagtaggcgcgcaggttggcgaacttctgccaggcatcgcccggcatgcggtcgagaatcgattttttgccgtgcaccacttcatcgtgggagagcggcagcacaaaattctcggtgtagttgtagagcatgccgaaggtcattttgtcatgatggtagcggcgatgcaccggatcgagcttcatgtaatccagggtgtcgtgcatccagccgaggttccatttgaaccagaaaccgaggccgccgccggctggcggacgggtcaccccggcaaaatcggtggactcttccgccatggtgaccgcgcccggcgtctgttcgccaaggatgcggttggtgttgcgcagaaactcaatggcttccagattctcccgaccgccgtattcgttggggatccactctcccgccttgcggctgtaatcgcgatagatcatcgaggccaccgcgtcgacccgcagcgcatcgatgccgaagcgttcgatccagtacagcgcgttacccaccaggtagttgctgacttcccgacgtccgtagttgtagatcagggtattccagtcctggtgatacccctcgcgcggatcgctgtgctcatacagcgaagtgccgtcaaacgaggcaagggcaaaatcatccgccgggaagtggccgggcacccagtcaagaatgacgttcagcccggcggcgtgcgcggcattgataaagtaacggaaatcgtcgcgggtgccgaagcggcgggtcggcgcatagagcccggtgggttgatagccccagctgccgtcgaacgggtgctcgttaaccggcaatagttcgagatgggtgaagcccatccatttcgcatagggcaccagctggtcggccagctcgcggtagctcagccagaaattattatcggtatgacggcgccaggagccgagatgcacttcatagatagagatcggggcatcaaactggttcgccgctctgcggtccgctggctgttccactttgggcggcaggtcgcagataagcgaggcgctttccggacgcatttgcgactcaaaggcgtaagggtcggctttgacccgcagattgccgtgggcgtcaatcagttcgaatttatacagctggccattgtgcgcgccgggaacgaacagctcccagatcccggactctttgcggaatcgcatcgggtggcgacggccatcccagtagttaaactgccccaccaccgatacgcggcgggcgttcggcgcccacaccgagaaacgggtaccggtgacgccgtccatggtggcagcgtgcgcacccagcgtttcataagggcgcaggtgggtcccttccgacagcagccagacgtcaaggtcctgtaacagcggaccaaagcgataagggtcatcgatcagattctgctgcccgtgccaggtgacggctagctgatagcgaaaagcgtttttacgccgcggcaggacgccgctgaagaaaccacgcgagtcgagacattcgagcttgccgactttgcgtccggttttcggttcaataacccacacgtcggtggcatcgggtaataatgcgcgcacttccagcccggcgtcagtacggtgcatgccgagcacggaaaagggatccgcgaaatgaccggcgattagcgcattaatcacgtctctatcaatatgattagacatgctttcatcctgttgtaagtgtcgctcattcctgtaactggcgactttttttgacctgaacggcgcagtgctctcagcatcctcctgctccgtcccaccttcaggtaaggaattccttacttaaagcatagccaaggctgagttacctccgtggggaaaaatctaacatccgcgtttactccttgtattacgcaaaaaaaaagggggcttgaagaccccctttctgttcatcctgggcttacgccagctggcgaagcatccggcgcagcggctccgcggcgccccacagcagctggtcgccaacggtaaaggccgatagatactccggccccatattcagtttacgcaggcgtcctaccggggtggtcagggtgcccgtcaccgcggctggggtcagctcgcgcatggtaatctcacgatcgttcggtaccactttggcccacgggttgtgcgcggccagcagctcctcaacggtcgggatagaaacatctttcttcagcttgatggtaaacgcctggctgtggcagcgcagcgcgccaacgcgaacgcagaggccgtctaccgggataacggacgaggtggcgaggatcttgttggtctccgcctggcctttccactcttcgcggctctgaccgttatccagctgtttgtcgatccacgggatcaggctgcccgccagcggtacgccaaagttatcgaccggcagctcgccgctgcgggtcagcgacgtcactttgcgctcaatatccaggatggcggaagccgggtccgccagctccgcagccacatgattatgcagctgccccatctggctcagcagctcgcgcatatgacgcgcgccgccgccggaagccgcctggtacgtcgccacgctgacccactccaccagatcctgagcaaacaggccgccgagggacatcagcatcaggctgacggtgcagttgccgccgacaaaggttttcacgccgttgttcaggccggcggtgatcacatcctggttaaccgggtcgaggataatgatcgcatcgtccttcatgcgcagcgaagaagccgcgtcaatccagtaaccctgccagccgcttgcgcgcagcttcgggtaaatctcgttggtgtaatcgccgccctggcacgtgacaataatgtccagcgccttcagcgcgtccagatcgaacgcatcctgcagcgtgccaccggtgctaccgccgaatgacggcgctggctgtcccagctgggaggtagagaagaacaccgggcgaatggcgtcgaaatcgcgctcttcaaccatgcgttgcatgaggacagagccgaccattccgcgccagccgataaaaccaacatttttcataacgtattcctgcgaggtgtgtgctgtttgtgcctggccagtttccaactggattatccctcaccttacaaaatgcagctaaagtcgcaagtgaaattaatcaatgattgctgaacaatcagaaaagcaacttatcctgcacattgtccaccgtcgctggtcgtcgtcaaaagcgcaacgattatcggggaaatcccccggggaatggaatattttccgtcgctattttattgatcctgattatggattaagcgtgaaatctggtgcttttccgcttgccaaaaaaaagcgacaaacccagtcacagcaagggctgacgagggatacgagcatcgtcgtagcgctaataagggccaatagctggcaaggaaaagagggaaaaagggcggtttattgcaaagaagccagggtaagcagcgttaccctggctttttatttcccgcgagcgggagatgagcgggcttagctcagcagctggaaggcgatcataccgacaatcgccccggtggtgccaaggatggtttccatcatggtccaggtcttcagcgtctgggcttcactggcgccggtaaatttaccaaacagccagaagccggcgtcgttcacgtggcttaccacaatcgagccgccggcgatacagatagacaatgccgccatctgcgcgccgctgtaattcagctgctcaatcaccggcatcaccaggccgaccgccgtcaggcacgccacggtggcagagccctgaatgatacgcaccgccgccgccagtacgaagcaggtaatggcgatcggcagccccattccggtcagcgcttcaccaagcgccgggccaacgccggagtcaaccagcacctgcttgaagacgccgccagccccgatcaccagcagaataatcccggccggctgcagcgcgtggccgcaaatctccatcacccggtctttcgccattccctgacgtaccgccaggccgtaaatcgccaccaggcaggccaccaggatcgcggtgaacgggtggccgataaactcgaaccattcgtaggcagtggaacccaccggcacaaagcgcgcggcgatggttttcaggccaaccagcaccagcggcagcaggatcagcgccaggctgaagccgaaggagggcatcttgccttcgccgagatgcggttccgtgacgtcgtcaggaatatgtaattcgacgtagcggctgatgaagttgccccatagcggaccggcgataatcatccccggaatggccgcgcacaggccaatcaggatcatccagccaaagtcggcgtgcatttgcgacgccagcagcatcggcgccggtccaggcaacagaaacgccgcggcggcggcaacgccggcaaacagcgggatcaccagcttcacgaggttagtaccggtatggcgcgccatcgagaaggcgacgctaatcagcagtacgatcgccacttcgaagaacaacggcagcgcgcagatgagaccggcgagaccaatcgcatagtgcgcgcgattgtggccaaaggatttgagcatcttgacggcaatctgatcgaccgcccccgtttcatgcaggatcttaccgaacatcgcgccgagcgcgacgacgatcgccaggaagcccagcgtaccgcccatccctttctccatcgtcgccgcgattttatccagcggcatgccggagaagaggccggcgccaatagaaaccaccatcaaagccacgaaggcgtgcattcgcgccttcatgactaaaaacagcagcagcaataccgagccgactgctgttaaaacaagcgttaaagtactcactagtgactgcctttgttgatcacctcgatggtgctggccaccacgccttccagcggctggtcgatatcgacgataagcacatcgctctcgtcggcgcctggttcctgcagcgtttcaaactgcgtcaccaacatttgggttttaaagaagtgccctttacgcgccttcagacggctttcgatcacgtcgaaatcgcctttcaggtagatgaaggagaggttcgggttgcccttgcgcagaatgtcgcgatagctcttcttcagcgccgagcagacgatcagcgacaccttgttggtacgctgcatggcgaacgcggcgtcatttagcgcctgcagccacggcgtgcggtcgtcatcgttgagcggctcgccggaggccatcttggtgatattgctgcgcggatggagaaagtcgccgtcaagaaacgcggcatgcagttgatgcgccacttcgctggcgacagcggattttccgctgccggaaacgcccatcaggacatagacgtggtgatcatggttagtcgtgctcaaagcgtcctcccactggactggtacgccgcgccggggctgactcatccagcgcgaaggcggcgtatcggttaattgttacgggtaactgttatcggtaacattgtcatgccggacctgtggagaagcaatatccattcgtgccagatgtgaatatgtgtgatctacttcaaacttgtcagtttaaattgatccgcccggtgacaatgtgaaacctaaatctaacatcttaggggtaatcgcttcaccacgaatgcgcgccagcagccgttcggcgccgatgcgccccatccgctcgcgcggggtcaggacgctggccagccgcggctccatcacctggccgatatcatggccgtggaacccggcgatcgccatatcatcggggatcttcagtcccagacgctggcactcgaacgccgcgccgaccgcgaggtcatcgttggtgcagaaaatgccgtcgagctgcggatattcgcggcgcgcctggcgcatcagctcaatccccgaagaataggacgaggattgctccaccatcacgctgtagggcgtcatcccggcgtcaagcattgcctgctcgtaccccttctgtttgatgatagtacgttcatcaagacgcgcccccagataggcgacatggcggtggccgcgggcgatgatcgccgcggtcatctgccgggcggcttcaaagttatcaaacccgacggcaatatcgagacacggcgaccggctgtccatcagctccaccaccggaatgccggcgacttcgatcatcttcagggtgcgcggcgtatgggtgcgttcggtgaggatcaggccatcaatgttccaggagagcatcgattcgaggcgtttctcttccatttccggcttatagccgtagtgcgccagcatggtttgatagccgaaggcgtcggtgacgctttcgataccgcgcagtacttccgaaaagacctgattggttaacgacggcagcagcacgccgatggcgcggctggtggcgttggaaagaatgtcaggggcgcgattgggaatataacccagttcatcgagggcaacggcaatcttgccacgcagcgcttcggagacctgctccgggttgcgtaaatagcgactgaccgtcattttggtcacgccgacaagatcggctacatcctgaagtacgggtcttttctttttcatcgtcctgactgtgatcaacgggaaacattttctcagtttatcacggacaaagcgcaaccttccctaacatgagggaaggctgcgcaatttatttaacctggctcagataactatcaaaccggcggcagatcgaacagcaggatctcgctatcgctgtcggcatgaaccgaaatcgcctgctcgtcccagatggccaaaccgtcgctggtggtggctttggtaccgttgatggtcacttcgcctttgaccacctggatccacacgcggcgttccgcggcaatctggtgaaccgactgctcatctttcagcagcgcccagcgatagagttccatatcctggtacaccttcagcgagccatctcgcgcatccggcgacagcaccagctgtttgccctgggcggcgtcgaagcggcgctgctcgtagcgcggggtaatgccggtttcttccggaataatccagatctgatacagacgcagacgatcggttttgctcgggttgtactcagagtggcgcaccccggtacccgcgctcatgatctggaactcgcccgccggcacctgctctttgttgcccatgctgtcctggtgctccaccgccccttccagcacataggtcaggatctccatgtctttgtgcgggtgggtaccgaagccctgaccggcgtcgatgacgtcgtcgttaatcacccgcagggcggagaagcccataaagttcgggtcataatagttggcgaaagagaaagtatgccaggaatccagccagccatggttagcgtggccacgttcgttcgcttttcgtaaatagatcatgttgcacccccgtatgttgtcgatggagtcagtgtggacccatttcgccggcgatcatagagggtgaaaattgactcctctgttcaaaaaatatgaacaagcgcagaggagccaatttgacttatcgggtaagggtaatggtggccggtgaaggctgctcaaagccgcgctgcaggatctccatattggtgagaacgtcagtttccttgacgtaattcggctggccgttgacgagggtgtcgtacagcgcgtcgtacacccggccataatcgccgctctccagcggcaccgcttcgcgcaccatctcccctgcctcgttgacatacaccagctcgccaacgctgtcgtccgcgccaaatcccggctcgcccggcatgatattggccttcaggctggtctcctgctggtcaatgccgtacttcacaaacgaacctttgtgcccgtgaacgataaatttcgggtaatcgatctgcaccagatggctggtcttaacgatggccttcatatcgccgtagaacagctgggcttcaaaggtgtcatccgggttggctttattgcgcagcgagcgcagatcgtaagagacatggtccgggcggccgaacagcgaaatgatctgatccagggtatgcacgccaaggccatagaactcgccgttttgcggaccgccggggttggtctccgccagcgggcgataattatcgaaatggctttcgatctccaccagttcgccgagtttcccgctctcaatcacctttttggtggtcaggaagcaggagtcgaaacggcggttctgatagggcgtcaccgtcaggcctttgctgttcgccagggcaaacagagtttttgcttcctccagcgtcggggtgaacggcttttccaccagcacgttttttcctgcctccagcgcctttttcgcatattcaaaatggctgtcggcgtgagtgcagaccaccaccagcttgaccagtggatcgtttaatacttcatcaaggtcgctggtgaaatgaatatgggaatactgcggcgcctgctcctcgggcttcgcccggcggcggtaaatgtgcgctacctgccagcggtctttgcggtgcaaaacgtaaggaaggtgatagcgggtggtgcttttaccaaagccaataaatgcgcagtgcagagtcataacgctgtccttagttaatgagctaccttcaaccatagcgcaagccggtccctcacttcatcctctctgtttgcttgcagtgaagattcgttaggaaaatagttcgagtatcactcatacgtaattattaataacctattgattaataagtgattaaatcagcagttttcggcaaaaaaccttgatcgccatggcaaaactgcggataagtggagagcaaaccaggaggttgctgatgactaacggagtagccagccgctgctgatggacaaacagtatctcgccataaacggcgccctttttttctggcttctcgcgctgatcgcctggtctgtcgatgcaagcgcgctggcgcgcctggcggccgcctgcgcgcttatcgctttcctcctccatagccaacggaacaagattaacgcgatgtttattaagaaaaataaaacggaacctcagatatcagaagcagccacgcctccggcaattaacccagaacccgaagcggtcgccagcaaaaaacacgagactacggtcatcgccagcggggtgcatttcgtcggcaatatagtcgccagcggccatgtctatatccacggtcaggtcaccggcaacattgaggccaaagagcatttgattaaggtaatgcgtgaaggccaggtggagggcaacgtcagctgccgggagctaataattgacggcaaggtgcaggggcagtgtcatggcgacagcatcaccatcgaggagcacggccatctggagggtaccctcgcctatcgcgcgctggcgatcaagaaaggcggcgtttttagcggtcgcgctgaactgctggccgccgcggagaacaaaagtcatattctcggtctggtagcagacgcaccctccaaagccgacgcggagcccgtcaggccgcagagcgcctgagatagcagcaaaaaaaaagccagcacccggctggctaaagtaatactggaagcaatgtgagcaatgtcgtgctttcaggctttccgcaagggtctccctgaatgcaggacaataataatcattctcattcgcacttgtctacttttttttgcaaataatgcgtgttgactcgaacgccgtagtcagtgatgtttaaagggacttttcacctgaatgaggaacaaggaatgagtgacatcgtgatacgccatgctgaaccgaaagatattgacgcgattcgtcaaattcacgcccagccggaggtgtatcacaacacgctacaggtccctcatccatccgaacatatgtggcgggagcggctaaccgatacgcccggcgtgaagcagctggtggcctgtatcgatgagcaagttgtcggccatttaagcattgccgtcgtccaacgtccccgccgtagccacgtcgccgattttggtgtcagcgtggattcgcgctggcacaaccgcggcgtcgccagcgcgctgatgcgtaccatgattgatatgtgcgacaactggctgcgcgtcgagcgtattgagctgacggtgttcgccgataatgccccggcgattgcggtgtataagaagtacggctttgagatcgaaggcaccggcaggcgttacgcgctgcgcaacggtgagtatgtggatgcgtattatatggcgagaatgaagtagcgtgttgccgggtggcggcttcgccttacccggcctgcgttcgtgcagttgtaggcccggtaagcgcagcagcgccaccgggcaacacatcaataccccgccgttaaatcatccggcgaacgcggatcggaggcgccatacagcatgccgtccggccccaccatgatgctctgggtactgcccatcgcctctttcagcgccactttctgccccttcgcctccagcagcttcagggtatccgggctaaagcctttctccacccgcagctcatccggcagccattgatggtggaaacgcggcgcgttggtggcttccgcgacgttcatcccgaaatcgatggtattgaccaccatctgcagtacggtggtgatgatccgactgccgcccgggctgccggtcaccagccaggttttgccatctttcaccacaatggtcggcgacattgacgacagcgggcgttttttcggctccaccgcattggcgtcgccgcccaccagaccatagacgttaggcacgccgggcttcgccgagaaatcatccatctggttattgagcagaatgccggaattaccggccacaatgccggtaccgaaggtcgtattcagtgtataggtcaccgccaccgcattgccgtctttatcgaccaccgagaagtgggtggtctggttgctttcatagggcgccagcttgcccggacggatctggctggaaggcttcgctttgttgacatcaatctcggcggcgatcgctttggcgtaagccttgctggtcagcgcctgccacggcacgttgacgaagtcagggtcgccgagatattcagagcggtcggcgtaggcgtgtttctctgcctccgccatcacctgcatggcgtcggcgctgccaaaaccatatttctgcatatcgaagttttcgaggatattgaggatctgcacgatatggatcccgccggaggacggcggcggcatagagtaaacctcatacccgcgatactcgccgctaaccggcgtacgctccacggccttatagccggcgagatcggctttggtgattagcccgccgtgctttttcatctcgtcagcgatctggtcggcgatggcccctttatagaaggcgtccgggccgtgctcggcaatcagctccaggctcttaccgaggttcttctgcaccagccgatcgcccttcttcagcggctcgccgttcttccagaagatcgctttactattttcatgctgcgggatcacttcgctgccgtaggtcttcagatcgtccgccagcgcatcgttaacgataaacccctcttccgccagcttaatcgccggacggatcactttgttcaacggcatggtgccatacttttccagcgcgagggagaaaccggcgacgctgcctggcgtgccggaggccagatgcgaagtcagtgattttttactgtccgggttgccctggtcgtcaaggaacatgtcgcgggtggcctgctctggcgccatttcgcggaaatcgatcgccgtggtcttgccgtctttagtccgcagcatcataaaaccgccgccgccaatattcccggcctgcggatgggtgaccgccagcgcgtagcctaccgctaccgccgcatcgacagcgttaccgccctggcgcaggatatccacgccgacgcgggtcgccagcgcgtccaccgaggccaccatcccctgccgggcgcgtaccgggtggaacacatcttcctctacgccataagagaccggcggcggcggtggcggattggcggcgacggtaaagctgccccccgccagcaacgcagcgatgaccacctgacgccatattgttgtttttatcattgtcttactcctgaaaggtaggtttcattccccgcttaagcctggttgataactcctaaaaaatcattgttatggcagattcgaggtacacttaagtgatcccacgcacgggaggagaaaaccatgaaagcgattctgtttctggcggcgctgatgccgcttggcgtattagcccagccgatcaatattaataacaaccctaaccagccgggttacgtggtccccagccagcagcgcatgcaaaatgagatgaagatccagcaacagcagcagcaaagcatgctaaagcaggatctaaacaatcagacccgctcgcagcagcagcatttgcaaaaccagctgcagactaatcagcagcgcgcggcccagggcggcaatctgaatgcgccgcagcaggtgcggccaaataacaacggtggaatgctgcggcagactaatccgtaaaggtcgtccgccgcaaatccgtcttaaggctggaaattcggcccgataacatcaatggcatcggtgcagatgcagtctacgccccagcgcagcagttcggcggcgcgctggggtttattgaccgtgtacaccagaatgtgcaggccggcctgtttcaggctcgccacccgcgccgcatccagcagtttgtgattgaggtgaatcgacacgcagcccaaccgggtggtcaattcgcgccagtcatcgcgccactcatccagcagcagcccgcgcggcagctcgggcgcggcttcctgcgccgcctccagggcgtcgatttcaaaagaggagagcagcggcgcggtcatgccttgccatagatcgcgcgcggccagcgccaccactctgccggtctgcggccccaacccggtggtcggcttaatttcgatattcgccatcatgccgtgacgacggcagcgctccgccacctgggagagcagcggcagcggctcgcccttaaattcacggctgaaccagctaccggcatcgaccttcagcagatcgtcccacgccagctcgcccgccacgccccagccattgctggtgcgttcgagattatcgtcatgcagcagaaagatctgcccgtccttcgacagcttggcgtcaaattcaatcatcgtgtgcccgtagcgggcgccgacgtcgatagccgccagggtgttctccggcgccagtttaccgccgccgcgatgggcgacgatgcggggataaggccagttactcatgcgcgttgtcctgtttcaccatcaaagaggtgcagatgttccaaaggcagatgcagccatagcgtgctgcctgccgccgggcgctgctgatgcggcagtctgaccaccagcttctgttcgccccagcgcccgtgagcgaggttatcggcacctaaaatttccagggtgtccatcagcagcggaataccaccttgcgcctgcgagcttaagataaaatgctccggacggataccgagcgtcattttacgcccagcgtggcgccggtgctcatgattcgtcggcagctgcatgccgcccgccagctcaaagcgaccgccgtcatcgctgatgcgcccttccagcaggttcatggccgggctgccgataaagctcgccacaaagcggctggctggcttctcatacacttccaccggggtgccgatctgctcggcaacgcctttgttcatcaccatcacccgctgggcgagggtcatcgcctccacctggtcatgggtgacgtacagcgaggtggttttcaggcggcgatgcagctgctgcagttccagacgcatctgcacgcgcagcttggcgtcgaggtttgacaacggttcgtcgaagaggaataccgccgggtcacgcacgatggcgcggcccatcgccacgcgctggcgctggccgccggacagttcccgcgggcggcgcttgagcagaccatccagctcaagaatgcgcgccgcctcctgcacccgctcggcgatcaatcccttacccatgccgcgaatcttcagcccccacgccatgttctcttccacgctcatatgcggataaagggcatagttctggaacaccatcgcgatgccgcgatctttcggctccatctcggtcacccgtttacgatcgatccagatatcgccgctggtcacccgttcaagtcccgcgaccatccgcagcagcgttgatttcccgcagcccgacgggccgaccataacgataaattccccgtccgccacgtccagcgtcagcggttgaattacctgggttttgccatcccagcttttgcttactgcctgtagttttaaaccagccattttatttctcactatcgaccaggccgcgcacaaacgcgcgctgcatggctaaaacgatgacgaccggcgggatcagggtcagcagcatcgccgccatcacctgattccactgggtagtaccttcgccggtggcgatcatgcctttaataccggcgacggcggtgccaagattcacatcctgaataatcagcaacggccacagatactggttccagccgtagataaaggtgatgacgaacagcgcggcgaggttggttttcgacagcggcagcacgatgtcgcgaaagaagcgcatcggcgaagcgccatcgatacgcgccgcttcaatcagctcgtccggcagggtcataaagaactggcggaacaggaaggtagcggtggccgaagccatcaacggcagcgttaacccggcatagctgtcgagcatgttgaggttggcgatcacctccaccgtcgggaaaatacgcacctcgaccggcagcatcagggtgataaagatcatccagaagaacaggttacgcagcggaaagcggaaccagacgatggcgaacgccgaaagcatcgacaccacgattttgccgaccgtaatggcgaacgccatgatgaaactgttgagcatcatcagccagaacggcgcgctgttgacgccgacgccgttcacccagatggtcttcatgttctccagcagatgtccgccgggaagcagcgtcatcggcgtttcaaataccgatttgttatccagcgtcgccgccacgaaggcgacgtacagcgggaataaaatgacggcgatacccaggatcagcatagtgtggctgaaaatcgtcagcccgcgacggttctcaatcattggtaacgcaccttactttcaacgtaacggaactgcaccaccgtcaggataatgacgaggaacatcagcaccaccgactgcgcggcggaagcggatagatcgagcccggcgaaaccttcgcgatagattttgtagatcagagtggtggtcgcctgcaccgggccgccagcggtggcggcatcgatcaccgggaaggtgtcgaagaaggcataaaccaggttgaccaccagcaggaagaaactcaccggcgcaatcagcggcagcgccagcttaaagaagcgacgaatcggcccggcgccgtcgatggcggcggcctcaaccagcgaacgcggaatcgactgcagcgcggcgaaaaagaacaggaagttgtagcttatctgtttccacaccgaggcgaagaccaccagaaacatcgcctggccgctgttctgcgcatggttccagtcgtagcccagctcgccgaggaaatgggtgatcagcccgcgcccggggttaaagaggaagatccacagcaccgccgcgacggcgggggccacggcgtacggcagcagcatcagcgtttgataaaagcggctaccgcgcaccacatagtcgaccagcgcggcgaaaaacagtgaaatgagcaggccgctgacggtcaccagggcgctgaattttatggtggtccagaacgagtccaggtagtacggatcgtggaacagcgcaacgaagttatccaggccgacgaactggctggaaaggccaaagggatcgacgctctgcagcgagtaccacagcgcttcgcctgcgggccagataaagaaaatcaacgtgataatcagctgcggcgcgaccagcacatagggcagccagcgcgagcggaataccggacgggatgatgacattgagattgggttcctgaacaatgccgggtggcggctacgccttacccggcctacatagggcacatcgtaggcccggtaagcgcagcgccaccgggcaagttacagattacgatttagtcgcttgctcgaagcgacgcagcagctggttcccgcgctgcacggcggaatccagcgcctgctgcggggttttcttgccggtccacacgctctccagctcttcatcgacgatggtgcggatttgcggcatgttgcccaggcgcagacctttggtaaacggcaacggcggcttgttcagcatctggcgggtagcgatatcggcgcccgggttcttatcatagaagccctgctgacgcgtcagatcgtaggccgcggtagtgatcggcaggtagccggttttctggtgccactcggcggcgttttccggtttggtcaggaagtcgaggaacttcgccacgccggtgtaggtctctttgtctttgccctgcatcacccacaggctggccccgccgatgatggcgttctgcggcgcgcctttcacgtcggcatcgtaaggcatcatgccgacgccgtagttaaatttggcgtactggcggatatcggccagcgagccggacgaggcagtggtaatggcgcagtcgccgttatagaacttttcggtagactcgtctttacgcccgaagtagctgaaatcgcccttcttgttcatctcttcgagcagcgcgatatgcttcacctgctccggcttgttgaactcaagaaccgcgtcggtaccgtcgaagccgttattcttcgtggccaccggcagaccgtgccaggcgctgaagttttcaatctggatccagccctgccagccgctggcgtagccgcacttcatcccggcggctttcagcttcgcggtataggccgccagatcctgccaggtcttcggcggctgctccggatctaagccggcttttttgaaggcgtctttgttgtagtagagcaccggggtagagctgttaaacggctgggagagcagatggccggttttcgaatcggtgtaatacccggccaccgtcggtacgaactgcgattcatcaaacttgatgcccgcctcgctaaacacctggtagaccggcttaatggcttttgacgccatcatggtggcggtgccgacttcatacacctgaaggatagccggcgcgttgccggtacggaaggcggcgataccggcgctcaggctctgctcgtagttgcctttgtataccggaacgattttgtaatcaggattggccgcgttaaagcgttgcgccagagaatccacttctttacccagctcgccttccattgagtgccagaatgggatggtggtaaccgccagggcctgaccggcaaaagccaggctcagcgccagtcctaaagctgtatgtcgtaacgatatcatcggttatctctcttgttgtgccggatgcgcgatttcacgcgttttatgctcgcggggtaacatgacatgttcgaattacagaaaaataacttttttattacaaaaaaaagatagtaacgggtcagagagatgacaagccgatgaaaggacgggggaagtaaagtgggagctgagacacggataatattcgtgcggtcggctcccggggtcggcgcaagcgcctcgcccgggctacaaaccggcgaagccgccgggttgcaacgagttaaccgtcatccacgcaaacgcgcgacaatctgttccagggtaagttgccctgctgctgcctcgacggtcatgccgacgaagtctggattcgctggcaatataattccatttcgctttaaaaaaagcagggtgataaacagtgccgtacgcttattaccatcattaaatatatgaccgcgagaaatcgccagcagatgcatcgcagcgagtcgccacacgtctgtcacaccttcatattcaattttgtttagcaccctatacattatcgcttcggcacgccccggatcgggcataccggcaacgccaggcgtgacgcggagcagcctgtcgtgaaactgtattatctcttccgctgagataatctgcagcgtcatttatccgcaagctccctgatctcatcaccatgaaccgccatgatagccgcgaactcatcatccattctggccgcctggtagcgttcaaactcttctgcactaatgatgactgcagatttatgcccacgacgggtaatggtcacaggtacacctgtcactgcgctttccagcacatcggccagattttgccgggcttcgctatagttaaccgttctcataaaaacctccaaagctgtactcttttattgtacaacatacatgtacaaaaaaagagccaacaggctcttttaaatgtattcgtgcgatcggctcccggggtcggcgcaagcgcctcgtccgggctacaaaccggcgaagtgaacgacgccgggttgcgatgaattaaccgccgagataggcgctgcgcaccgcctcgttggccaacagcgcgtcgccagtgtcctccagcaccacgtggccgttctccagcacatagccgcggtcggccagcttcagcgcctggttggcgttctgctcaaccaggaagatcgtcatcccttgctcgcgcagctgctcgatggtgtcgaaaatctgctgaatgataatcggcgccagccccagcgacggttcatccagcagcagcaggcgcggttggctcatcagggcgcgaccgatcgccagcatctgctgctcgccgccggacatggtgccggcgcgctgaatacggcgttcatgcagacgcgggaacagctcatacacccatttgatgcgggtctggaactgatcgcggtcggcaaaaaaaccgcccatcgccaggttctcttccacagtcatacgcgaaaagacgcgccgcccttccggaacgattgccaccgcctcgcgcatgatcttcgcggtttgccagtcggtaatatccttaccgtcaaagacaatgcgcccgctggaggcgcgcgggtcgccgcacagcgtgccgagcagggtggttttccccgcgccgttggcgccgataagcgtgacgatctcgccctgtttgatatgcaggctgacgttgtgcagtgcctgaatcttgccgtagtgggcgctgacgttgtcaaaagttaacatcgcgttttccatcttatgcctcaccaaggtatgcgcggatcacgtccgggttattacgaatctcttccggcgtcccgttggccagcggtgttccctggttcacgacgtagatgcgatcggaaatgcccatcaccagcttcatatcgtgttcgataagcaggatggtggtgttgtgatggttacgcagctcggcgataagctcgtccagctctttggtctctttcgggttcagccccgccgccggttcatcgagcatcagaatttccggctgggtcaccatgcagcgggcaatctccagccgacgctggtcgccgtaggccaggttgctggcctgacggttggcatgctccagcaggccgatacgctccagccaggtggcggccctgtccagcgcttcgctctgcgcccgacggaaggccggcgttttcagcaggccggagaagagcccggttttcagctgctgatgctgcgccaccagcaggttttcaatcaccgtcatttcgcggaacaggcgcacgtgctggaaggtccgcaccacgcccatccgcgcaatctgctgacccggcagcccttccaggtgctggtcgcgcagcagaatagtgccgccggtgggcttgtaaaaaccggtcaggcagttaaagacggtggtcttcccggcgccgttggggccgatcagcgagacgatctcgcgctctctgagctccagcgacacattgttgacggccagcagaccgccgaaacgcatcatcaggccgctaacggataataatggctgactcatgcctgctctcctttcgcctgaccgtttttcagcttcaactgcacgcgcgtcattggcagaagcccctgcggacgccagatcatcatcagcaccatcaggccgccgagcattaacatgctgtattcgttgaagtcacgcatcaactcgcgcgagaccaccagcagaatagccgcgaggatcaccgcgaactgcgagcccatcccgcccagcacgacgatcgccagcacaaaggctgactcggcgaaggtaaaggattccgggctgacgaagccctggcgcgcggcgaacagcgtgccggcgaagccagcaaacgcggcgctgatggtaaaggcggtcagcttgatgcgcgtcgggctcaggcccagcgaacgacaggcgatctcatcttcacgcagcgcttcccacgcccggcccagcggcattcgcagcaggcggttgatgacgaacaggctgagcactaccagcagcaacgccaccaggtagaggaaaatcacccggtcggagggatcgtatttgacgccgaagaagttgctgaaggtatcccagccgccttcgcgggcgctgcggctaaattcgaggccaaagaaggtcggtttcgggatctggctgatgccgttcggcccgccggtgatctcggtattgttgagcagcagaatgcgcacgatctcgccgaagcctaaggtcacaatcgccaggtagtcgccgcgcaaacgcagcaccgggaagcccagcaggaaaccggccgccgcggagaccaggccggccagcgggagacaggtccagaatccaagaccgtaatagtggttcagcagcgcaaaggtatacgcgccgatggcatagaacccaccgtagcccagcaccagcaggccggaaaggccgaccaccacgttcaacccgaggccgaggatgatatagatcatcgtcagggtggcgatatccaccgtgccgcgcgacaccataaacggccaggccacggcaatcaccagcagggcgatcaggaacagcttctgcttcaccgtcgacccgtcaatcgccggcataataaacttcggcccggagacgttcttaaccgctttctggaacagcggccgcagcagctggaagaaaaagaccaccgcggtaccgatgaagatccactgccagcgaatatcggcggcggtatcgaccaccagtttggtgccgttcagctccagctgcacgcccataaagacgcccgccagaatgaagaacatcacggcagagagcagcgccattgcaatttgcatcggtttcatactttttccacctccgggcggcccagaatgccggtcggcatcactaacagcaccagaatcagcagcgcgaaggaaacgacgtccttatattcggtgctgagataggcggaagagagcgcctcggcaatacccaggatcaggccgccgatcatcgcgccagggatactgccgatcccgccgagcacggcggcggtgaacgccttcatcccggccataaagccgatgtaggggttaatcacgccgtagaactgccccagcagcacgccggccaccgccgccatcgctgcgccgatgacaaaggtcagggcaatgacgcggtcggtgttaatcccgagcaggctggccattttcagatcttccgcgcaggcgcggcaggcgcgccccatccgcgagtagcgaataaacagcgtcagggccagcatggcgataaaggtcaccacccagatcaccagttgcatggtggtgatcgtcgcggagaagctgtcgctgtggccgacgacccactggccgttaaacaagctcggcagcgccacgtcgcgggagccctgggtcaggctgacgtagttctgcaggaagatagacatcccgatggcggagatcagcgcaatcaggcgcttggagttacgcaccggccgataggccacgcgctcaatgctccagccgtaggcgctggcaatcacaatggcgcccacgaatccggcggcgaccagcagccagctagtgtcaatgcccatcatgatcagcgcggcgatgatcatgaaggagacatagctgccaatcatatagacctcgccgtgggcgaagttgatcatgccgataatgccgtacaccatcgtatagccgatggcgatcagcgcataggtactgcccagcgtgacgccgttaaacatctgctgcagaaaatagagaaactgctcggacataaggtaacctttttcaaaccgcccgcggatcgcgggcggagggataactcgtcttcagcgcttatttcgccgcgctcgaagagccgtcggcgtgccactggaagacaccaaactcaaatcccttcagatcgcctttttcatcccaggtcagcggcccaatcacggttttcgccccgtgcgctttcaaatctttgattaaatccagcggctgctggctgccggttctgtccatcgcctgcgccagcgactgcacggcggcataggtgatccagacgtacggtccgctcggatctttcttctccgctttcagcgcgttgacgatggcgctgttggcagggtcctgatcgtagcgttttggcattgtcaccagcatgccttccgccgcggcgcccgcgatattggacagcgaggcgttgccgaccccttccggccccataaacacggttttcaacccgacggagcgcgcctggcgcagcatctggcccatttccgggtagtagccgccgtagtagacgaagtcgatgttctctttcttcaggcgcgccagcagggcggagaaatctttttcccccgcggtgatgccatcgaagaagacgatgttggccccggctttcttcaggttgtcctgcaccgaacgcgccagcccttcgccgtactgctgcttgtcatgaatgatggcgatacgctgcggtttgactttctcgacgatatatttcgccgcggtcggcccctgcgaggagtcgaggccggcggtacgcatgatgtactggtatccgcgctgggtcagctccggattggtcgccccgggggagatcatcaggatgccttcatcctcatagatgtcggaagccggctgggtggaagaggagcacaggtggccgataacgtactgaatgccgtcgttgacgattttgttggccaccgcgaccgcttgcttcggatcgcaggcgtcgtcatattcgacggccaccagcttgtcgcccttaatgccgccgctggcgttgatgtctttaatcgcctgacgcgcgccattgaactccatgtcgccccactgggccactggacccgacatcgcgccgaccacggcgaccttaatatccttggccatcgccgcgtgcgacatcgctaatgcgacaatgcccgcgacgatggttttcgcgttccttttcatgctgcagaaccccgttcgtgatgtggtgtaaatgttttgtatttttatggttaaaaagcattctgtgcttttattaaacaacgccatttttaccattgagtttaatggtttagcgcagtttttcactaaaaaacagattaaaacctctatttttcagtcgattaagcaaagataatattctgtattttggtgaagataaacaaaaaaaagtccatcctgtagcataaaataacgatacataaggcggaataaaacgctgcacattaggttaaaattctgcttatttttcgatccatgacggattgcgctaccctgacaacgccaggaaaacgaatcccctgatgtacgcgcaaaaaacagcgctccgccagacagcaattttgggtacactggcgcctctgttttgcactggatttgccgcccatgaaactgaccattatccgtttacagcacttcagcgatcaggatcgcattgatctggggaaaatctggccgtcgcaggatctgtcgacgctgacccttgatgaaaaccatcgtctctacgccgcccactttaacgagcgcctgctgggcgccgtgcgcgttaccctgcgcggcgtcgaaggtgagctcagcgatctgtgcgtgcgtgaagtgacccgccgccgcggcgtcggacaatacttagtggaagagacattgcgtgataacccggcgatcaatagctggcgcgtcgccgaccatggggtggaggaccgcggcgtgatggcggcctttatgcaggcgctcggctttagcgcccagcagaatggttgggaaaagcattaagccgtagccccaataagcggagcatgaccaaggaagaacccggcggcgcttcgcttagccgggctacctggcgactgtagccccggtaagcgcagcgcgaccggggtcagacaacgcatttgcagtgggaaaggcgccccccatttaacccagcatttcgcgttgtaaaaaggcgtcaagacccgaaatccccgggagcttacatcagtaagtgaccggggttgagggccgcagacaacgcatttgcagtgggaaaggcaccccccatttaacccagcatttcgcgttgcaaaaaggcgtcaagagccgaaatccccgggagcttacatcagtaagtgaccggggttgagggccgcagacaacgcatttgcagcgtgaaagtcccccacccatttatcccagcatttcgcgttgcataaatgcgtcaagacccgacatccccgggagcttacatcagtaagtgaccggggttgagggccgcagacaacgcatttgcagcgtgaaaggcgcccctcatttaacccagcatttcgcgttgcaaaaaggcgtcaagacccgaaatccccgggagcttacatcagtaagtgatcgggattgagggccgcaaacaacgcatcggcagcgtgaaaggcgccccccatttaacccagcatttcgcgttgcataaatgcgtcaagacccgacatccccgggagcttacatcagtaagtgaccggggttgagggccgcagacaacgcatttgcagtgggaaaggcgccccccatttaacccagcatttcgcgttgtaaaaaggcgtcaagacccgaaatccccgggagcttacatcagtaagtgaccggggttgagggccgcagacaacgcatttgcagtgggaaaggcgccccccatttaacccagcatttcgcgttgcaaaaaggcgtcaagacccgaagtccccgggagcttacatcagtaagtgaccggggttgagggccgcagacaacgcatttgcagcgtgaaaggcgccggttaaattatttggcgtcggtcgccgtaccgttcgcatgccaggtaaagaccccgaactcaaagcctttcaggtcgcctttctgatcccacgacagcgggcccatcacggtgtctactgtcgcgcctttcaggtatttagcgatttccgccggatcgtcagactgattcaggcctgcctgcagcgactgcagcgccgcgtaggtggtccacacgaaggcgccgctcggatcctgtttcttcgccttgatcgcatccacgatcggtttgttcgccggcacctggtcgtagttcttcggcttggttaccagcaggccttccgccgactcgccggcgatgttagacagggagacgttcgctacgccttccgggcccataaactgggttttcagaccggcggcgcgcgcctgacgcaggatctggcccatttccgggtgatagccgccgtagtagacgaaatcgatattctctttcttcaggcgcgccaccagggtggagaaatctttctcaccggcggtgatcccgtcgaagaagaccacgttcgccccgccttttttcaggccatcctgcaccgcacgggccaaaccttcgccgtactgctgtttgtcatgtaccactgcgatacgctgcggcttcactttgtcgagaatgtatttcgccgcggttggcccctgatcggagtccagaccggtggtgcgcaggatcagcttatagccgcgcgccgtcagctccggagcagtcgctgccggggtaatcatcagaatgccttcgtcttcatagatatcagacgccggctgagtggaagaggaacacaggtgaccaataacgtatttgatgccgtcgttgaccactttgttggctaccgctaccgcctgtttcgggtcgcaagcgtcatcatatttgacgatctgcagcttattgcccttgatgccgcccttagcgttgatatccgctaccgcctgctctgcgccggtaaactcctggtcgccgtactgggccaccgggccggacatcgccccgactaccgcgattttgatatcttccgccagcgccgcgctgctcataactaaggcaatacatcctgccagtaacgctttacccttcatattcatcctgaggctccccattattatggtttttgcatttgttgtgatgttgtttattagcgcattattttgtttataccgataggaaaagcatatgatagctaatcaaccggggactgcccgcgcttttgcagcacactatgctaaacataccgtcattctgaggaatttgaaacgactaaattgcgggctatgtaacagataagtgacaaataaaaaaaccgcgccagcatgaaccggacgcggtgcaaaacagagcctgattaccagcctgcgggtaggtagcccaccgcggatgctatcgcgtaggcggcgctgcaaagatacaacaacacaatgaagcattggataagcggatgggtcatccaggccggacaggtccagcccggggtcagatcgccacgctggcgggcgcccttgagcatcaggatcggcataatcgataaaatgacgccgctgaacaccccggcaaaatagagcgcgttgacgaaggagaccatgccgctataggccagtacgaacggcgggatcgccaccaccagcagcaccatcaggcgccgggcgggctgttcgtcattccccaggcggaactgatcgaagatattggtcaggaagctgccgcccagtccccagtaggaggtcagcatcgcgcacagcgcaaacagattggctgagaagaaggcccattcgccaagcgcccgcccccaggagatggtggccacatccgagatattgtcgagaccgttaagcgagatcaccgacaacggcaccagcgccagcagggtaaaggtcagcgccataccgaccatgatggctttaggcaatttttccggtttgtcggcgaagccccgcgccatctccggcacgatatactgtgccgagaagcagaatgccacgacgttgaagaccggaaccatatacagccagttgccgtcgagcagatagccgacgcgggtggtatctttcaacagcgtggcaatcaccagcaccgagatcatcaccaccatgccgatgctgataaatttctcaccgcggccgatcgccttcagccccaggtagagtacccctgccgccggaacgaaaaacagcacgctgcccagcgccggcgagatgccaaacagggagtgcagcagcttaccgctgccggtcatatacgccgtcaatgccccgacgctattgacgcagacggagagaaacatcatcagcgcgccaaagccgccgacgtagcgcttcgataatccactgagctgcagatgtttacgggtgcgcagcgtggattccgcgacatagagcatagtcaccgtcgtcaggctgcccaccagcaccagccagaacagcagcggtaagaagcccgctttgctcgacgcataggcgatagagaggacgcccgcgccaatattggtaccgacaatcatcgataccccttcgacgaagctcagagattttgcagggacagccgtacgttcccggccggtgaggacgggagaaaaggtggagttttcagacataatacttaatgagatggtcactccctccttcccagtactatgctgaggacaggctttcattcggagaaccatcatggaaaacattgcgcttattggtatcgatctgggtaagaactctttccatattcattgtcaggatcatcgtgggaaggccgtttaccgtaaaaaattcacccgaccaaagctaatcgaatttctggcgacatgcccggcaacaaccatcgcgatggaagcctgtggcggttctcactttatggcacgcaagctggaagagttagggcattttccaaagctgatatcaccgcaatttgtccgcccattcgttaaaagcaacaaaaatgacttcgttgatgctgaagctatctgtgaagcagcatcacgtccatctatgcgtttcgtgcagcccagaaccgaatctcagcaggcaatgcgagctctgcatcgtgtccgtgaatccctggttcaggataaggtgaaaacaactaatcagatgcatgcttttctgctggaatttggtatcagcgttccgcgaggtgctgccgttattagtcgactgagtacccttcttgaggacagtagtttgcctctttatctcagccagttactgctgaaattacaacagcattatcactatcttgttgagcagattaaagatctggaatctcagttgaaacgaaagttggacgaagatgaggttggacagcgcttgctgagtattccctgcgttggaacgctgactgccagtactatttcaactgagattggcgacgggaagcagtacgccagcagccgtgactttgcggcggcaacagggctggtaccccgacagtacagcacgggaggtcggacgacattgttagggattagcaagcggggcaacaaaaagatccgaactttgttggttcagtgtgccagggtattcatacaaaaactggaacaccagtctggcaagttggccgactgggtcagggagttgttgtgtcggaaaagcaactttgtcgtcacctgtgctctggcaaacaagctggccagaatagcctgggcactgacggcgcgacagcaaacttacgaagcataaaggcagaaatacaccagtttaaacaatcattcatctggttttgcgaatactgatattgatgatactaacggcccaccggcctgttgaggaacctgtaaaacggaaaggctcattgaagccgtatattttctggaggttcatcaggcgcggaactcatcgaggcgcgggaataaaatcccattcagacgccggatagattcaagcaagccaacttgtcgtcaaaatcggtgttgcaaaaacgggagtgaccatagattccgttttactccggcggttttcaccgccggaaaaaaggtgatatcagagtgataaaccactcacgctgagcataaacagccggctgcggcgtcctgtttctgttcggcttccctgccgccgcagcccgccggggagacgttagctcttcagtacgcgcgccagaatatccagcgctttcgagaactgggcgtcggggatagtcaacggatacaggaagcggatcacgttgccgtagacgccacagctcagcagcagcaggccgttctcctgcgctttctgttgcacaaggcgggtgaattccggcgacggttcgcctgtttgcggatcgttaaactccaccgccaccatcgacccccggccgcggacatctacgatcgccgggcaggtagcgcgcgcctggttgagcacttcctgcagatggctacccagctgttcagcgcgctgacacagctgctcttcggcaatcacatccagcaccgcgtgcgccgcggccaccgccagcgggttaccggcataggttccgcccagcccgcctggggctggcgcatccatcacctcggcgcggccgacaacgcccgacagcgggaaaccgccggcgaggcttttcgccatcgtcatcagatccggtttcacctcatagtgctgcatagcgaacagcttgccggtgcgggcgaaaccggtctgcacttcatcggcgatcagcagaatgccgtgggtatcgcacaggtcgcgcagcgcctgcataaaatcggccggcgcgacgttaaagccgccttccccctggatcggctcgagaatgatggccgctacctggtccggcgcaatatccgctttgaaaatgcgctccaggcttttcagcgcatccgcggtggtcacgccatgcgccgcattggggtaaacgccgtgatacaccgagcccgggaatggcccgaagccgattttgtagggcgcgaccttaccggtgagggccatggtcataaaggtacggccgtggaaaccgccgccgaaggtaatcagccccggacgaccggtgtaagcgcgggcgattttcaccgcgttctcgaccgcttccgcgccggtggtgaagaaagccgtttttgccggcccgtcaattggcgccagatcgttgatacgctccgccagcgaaacatagctttcgtacggcacaatctgataggcggtgtgggtgaacgcctgcagctggtcggcaaccgcggcgaccactttcggatggcggtgaccggtatttaacacggcgatcccggcggcgaaatcgatcacctcattgccttcgatatcccacagcgtggcgttttccgccttctcgacaaagtagttacacattacgcctacgccgcgcggcgtcgcctgctggcgacgttgattcagttctgagcttttcacctgcgaatctcctgtcgtgtatgtcacgttatcgcaacaaattagaaacgatgtcgtttatttacacaggagttggccctataatcgagtaccaattttgaatatctgagggatccaattgcgttcgctggtgggtgacctggtgctggtccgtctgcaggaagagcgggatcctcttctgcacaaacgcttatataacgcgctgcgccgcgcgatcctcgacggttcgctggcaccgcaaagccgtctgccgccgtcgcgggacctggcgggcgaacttggcgtatcaagaaacaccatattaacaacttatgaacaattgctggcggaaggatatgtggtttcccgtcggggaagcggaacattcgttgcccaaaccgcccctgagagctcattgacggctaaaggtcagcaagaaaacagcagtatcgcagcaccgacggcgcatctttcacgccgaggccaacatctgctcggccaggtcagcgccagcccgcgccagtggggagcgtttatacccggcgtgccggacgttaacgcctttccccacccgctgttcagtaagatccaggcccgcatcagccgtcggcccaaaccggagcggctcagctatagctgcaacggtggcaccccggaactgcagcaggcgctggtggattatctgcgcgtgtcgcgcggcgtccactgtcagtcagatcaaattcttatcaccgaggggatccaccaggcgatcgatctggtcacccgcatgctgtgtgataacggcgatctggcgtgggtggaagagccttcctactgggggatccgccacgtgctggcgatgaacgacgttcgggcagagcccctgaccgtcgatgccaacggcctgtgcccgccggagacggttgacgatgcgccgaggctgatcttcgttacgccttcccaccagtatccgctgggcgcggtgatgagccttgagcgccgccagcgcctgctggcactcgcccgtcagcaggggagctggatcgtcgaagatgattatgacagcgagtttcgcttttccggtcagccgatccccgccctgcagggtctggtcgccgacgccccggtggtctatatcggcaccttcagcaagacgctctatcccggcctgcgcctgggctacgtggtgatcccgcggccgctggtcagcgacctgaagcacgcccatgccgagctttaccgcggcggccattcgctgatccagatggcgctggcggagtttattaccgccggccactattcggcccatatccgccgtatgcggctgctatacagccgtcgccgcgcctttttaactgagcttatccagcggcactgtatgccgtacgccctgtctgacttcagcgataatgccgggctgcatttgatcctcaatttgcccgcagaggctgacgatgtggcgatcgccagagaggccaatgcgcggcacattctggtgcggccgctgtcgcgctactacctgacggcggcgcgcaagaaaggattactgatgggattcgccagccagcccgaagagcagatggcgtcggcgttcagcgtcttactcggctgcctgcagacgcactgcccgcagatgctcctgctccgggaggacgcagaaaaacaaaacgccccaacctgaggcggggcgttatcggggagcctgatatcaggtatcaggcaggcgtggcgtatcaggcttcgatagcggcacgcagttttttcatggcgttcttttccagctgacgcacgcgctctgcggagacgccgtagcggtcggccagttcctgcagcgtggacttgttatcttcgtccagccagcgggcgcggatgatgtcctggctacgctcgtccaggccctgcatcgcgtcagtcagcttattcgccgcctgctcttcccagttatcgtcttcgatgccgtcggcaaagttagacgttttgtcctgcagatacaggaccggcgccatcggctggctgtcggactcatcgtcggacgacatgtcgaaggtcatgtcctgggccgccatacgggattccatctcacggacgtctttgctcgacacgcccagctcacgggccaccatttccacttcatcctggttgaaccaacccaaacgctgtttggttttacgcaggttaaagaacagcttacgctgtgctttggtggtagcgaccttcacaatacgccagttgcgcagcacgtattcgtgaatttcggctttaatccagtgcacggcgaaggagaccaggcgcacacccacttccgggttgaagcgacgcacggctttcatcaggccgatattgccttcctggatcagatccgcctgcggcaggccatagcccgagtagttacgagcaatgtgaacaacaaagcgcaggtgagacagaatcagctttttcgctgcttccagatcgccctggtaatgcagcttttcagcaagctcccgctcttcatcagccgacagcatcggccaagtgttagcggcccggatgtacgattccaggttaccaacgggggctaaagctaaagtttgcatttctttggtcattcaaatcctctcaattgatatcttctgacgcgttcttgtccccatcaggcaacaagcatgccagcattcatgagcaacgagaatatcactcacattagtatcagacagtgattttatccacaagttccatgcaacggtgtgaataaattacgcacaaaatgtgacaccacgatgaaaaagtgagggcaggaaaaggggaacaagcttgcggtatctttccctgcgaacaggaactcattgcagcagggaaagattatatcacgcttttattaatcgggagtaaagtgacgtaaatgttgcactgtcgccagccaggcggctacccacccgatcatcgagcagacgatcaacatcaacagacactcgtcgaagcctaagccgctcagctcaaactgggtgccgaagactttcgccacttcggtcaccgccgacgagaggcgcattaccagaatctccgacaggatcagcgataaaaacgcgccggaaaagcccagcatcgctccgccgtagaggaacggacgcaggataaagccgtcggtggcgccgataagcttctgaacgttaatggtatcgcggcgggcgaagatgctcaggcgcacgctgttgccgatcaccaggaacaccgccgccaccatcagcacgccgatcatcgccgacacgcgtcctaccagcccggtgagcgaggagagacgggcaaaccagctgtcgtccatccgcacttcatcgacaccctggatccgcgatacccgatcgcgcagggtattcagcgcctcggtgctctggaaatccagcttcggcaccacgatggcgaccgccggcagcgggttctcctccagcatatccagggcgccgccaaagcctgaccagttacggaactcccccagcgcctcgtcacgggacaaatagtttaccttgtcgacgccctgctccgcctgcagctggcccaccacccgcgccgcggcatcgtcatccagcgttttctccagataaacggtgatctgcggcgagggataatactgggacgcagcgctgctgacgtttttgtagaccatgtagcagacgcttggcagggtcaacgaaatggcgatgaccatgaccgtcaggaaggtcgccagcggcgtgctttttagatcctgcagcgcgccgtgccaggcatagcgcacctgctcgttgaatacgttgctcttacgcgaggccgggttaggcgccgctttcggccgttttggcgcattgcgcccgccaccgccgccgcccgcggcgttgcgcaggcgatcgaacttgctgccgaactggcgaatctggttcattgcgtcgcgcttattcaccccgaatgcctccatgcagatggccgtcgctaagcgtcagcacgcggtacggacgactggagataagccccagatcgtgcgtggccatcagtaccgtcaccccgacgcggttaaactcttcaaacagacgtaaaatcccctccgagagcgcctcgtcgaggttgccggtcggttcatccgccagcagcaccgccggcttgttgaccaccgcgcgagcgattcccacgcgctgctgttcaccgccggagagctgaatgggaaaattcttcgctttgtccagcaggccaaccttgtccagcgccgccgagacgcgacgacgaatatcatcgccgctggcgccggcgataatcagcgggatcgctacgttgtcatacacggtacgatccatcagcaaatggtggtcctggaaaatcataccgatctggcggcgcaggaacggcacctcacggctcttcagacggctgatttcatgaccgctgaagaagattttcccggcgctgggccgttcgataccacagataagcttcagcagggtactcttccctgcgccggaatggccggtcagaaacgccatctcgcccggctgcaggtggaaggtcaccccctgcagcgcttgtctcccaccgagataggctttgctgacttgttcaaagcgaatcattcttaatcctctcgggcaaaaagtgcctcaataaagtcgcccgcattaaacggacgcagatcctcaatacgctcgccgacgccaatatagcgaatcggaatgccgaactgatcggccaccgagaagatcacgccgcctttggcggtgccgtccagcttggtcaaagtgatcccggtcaaacctaccgcctcatggaacagtttggcctggctaatagcattctgcccggtgctggcgtcaatggttaacatcacctcgtgcggcgcgtcgacgtccagctttttcattacccggacaatcttcttcagctcttccatcaggtgcgatttattttgcaaacgcccggcggtatcggcaatcagtacgtcaacatggcgcgccttcgccgcctgaatggcgtcgaaaatcaccgaggcggagtcggcgccggtgtgctgggcgatcaccgggatattattacgctggccccagacctgcagctgttccaccgccgccgcacggaaggtatcccccgccgccagcatcaccgacttaccctgctgttcaaactgacgcgccagcttgccgatggtagtggttttccccaccccgttcacaccgaccatcagaataacaaatggcgttttgccttcaacgttcagcggctcgtctactttggcgagaatctcgcccatctcttctttcagcaggccgtacagcgcttccgcatcgcgcagctgcttacggctggcgccttccgtcaggttggtaatgatcttgcgggtggtttccaccccgacgtcggcgatcagcagctgttcttccagctcttcaaacagatcatcgtcgatcttcttaccgcggaacaggctgataaatccggaaccgagattttgcttcgttttcagcaggctacgtttgaggcgggcgaagaaaccttcttttgtcggtttttcctgctcctgagccagcgcttcaagcggcgcctcgtcctcgggcgccggcaccactaccgccgcctcttctgccgcttcggccgccagcgcctgcgcttccagctcttcatcgcttaacggcgcgtcctcttcgggcgcttctgtctcctgcggctggacaacgatgccttccacaggctgctctgctacggcttccgccaccaccggttcggcgataacctcttccgccagcggctcaaccaccgcaggctgttcaggcggttcgctgaccgcgggctccggttcaacaacaggcgtttcttcggtcagaacaggcgtttccacccactcttcttcctgcgcgctggcaggctccgcgaggtgcgctttttcgctttcgaccaccgtctcggtcacttcgacgacgtcttcggcaaacgcctccgggtctgctttcggcgcgctcggctcagcaggggtttcaaccgccggtatctcttcggcaaccgcttgctgttcttctactttttgctcagtctcggtttcctgtgcctgttctttctgtccaaagcccagccaggaaaagaagccacgttttttctcttttgccatttgcgaccacactcctcgctgtttattcatggcgcagcttcatcagaagctgaaaaaatgatgaaattagttggatagtctatcacttaacttaactcgcagcaccgcccccggattaaggtttcgtcaaccgccgtcgatcgctagaatagcaggctggaagttgagacttgagcagagagatgaaaaaaccaaaccacgcgggcagcggccagatccgcatcatcggcgggcaatggcgcggccgtaaattaccggtgccggagagcccgggcctgcggccgaccaccgaccgggttcgcgaaaccctttttaactggctggcgccgtccattgttgacgcgcactgcctcgattgctttgccggcagcggcgcgctggggctggaagcgctgtcccgctatgcggccagcaccacgctgctggagatggagcgcggcgtagcccagcagctgcaaaaaaatctcgccaccctgaaagcgaatcgcggcaaggtgatcaccaccaacaccctcagcttcctgagccagccggggaccccgcaccagatcgtgttcgtcgacccgccgttccgtcaggggctgctggaggagacgctacgtctgctggagacacaaggctggctggccgatgaggccctggtgtacgtcgaaagcgaagtcgaaaacggcttaccgccggtgccggctaactggcaattgtatcgtgaaaaagtggccggacaggtcgcctaccgtctttaccaacgtgaggcccaaggagagcaccatgctgattaatttaggccgcctgctgatgctgtgcgtctgggcctttctgttattgaatctgtttcagcccttcccgaagccgctgaatatctttgtcaacgtcgcgctgattttcatgatcctgatgcacggtctgcagctgacgctgctcaaggcgacgcagccgaaagaggcgccgccgctgagccgctttgagcaaatccgcatttttattttcggcgtgtttgagctcgtggcctggcagaaaaaactgaaggcgacgctgaaaaaatagtcctgaaaagggctcagggatcgggcgtaaacgccacgaacgctgtgcccttataactcaacatcccacgatcgccgacgctcagcgcgtgatattgcggcgcgtcaaggcgaaacaccacctccagcccaccgttttcggggcgaaagctcgcttcatagcgcatctcactgcctgcaggcgtcaccgtctgctgccgcgagcgccgatcgttaatcactttttcccgtttattgctgacgataacccgcttttgtagcaacggcgcggcgtcattcgcctgtttctcacggcgctgctggacatagcgaaacgaagccgccaccacaatcaccgcgacgaccagaacaaaaaagaggggcattttactcattagggttacccataaaaaatatcaggaatcagcatactgcgtcgggaataacattgtcatctgctacgccaaaccactacactgagtagtagcatcacgcatccgtaactttctttatgataacagatacagggacttactatgctttggtcatttattgctgtctgtttctccgcatggctttatgtcgatgcatcctatcgtgggccggcatggcgacgctgggtttttaaacctgtcaccctgattctgttgctgttactggcctggcaggcgccgatgttcaatgccatcagctatctggtgctggctggcctgtgcgcctcgctgctcggcgacgccctgaccctgctgccgcgccagcgggtgatgtacgcggtgggcgctttcttcctgtcacatctgctgtataccatctggttcgccagccagctgacgctgtcgttcttctggccgctgccgctggtgctgctggtattcggcgccctactaatggcggtgatctggagtcggctggaagagatgaaaatgccggtgctgacctttatcggaatgacgctggtaatggtctggctggccggcgagctgtggtttgcccgccccaccaacaccgcgctgtccggtttcgccggcgcagccctgctgctgctgagcaatgccgtgtggctggtgagccactatcgtcgccgcttccgcgccgataacgccatcgccgccgcgttctactttgccggccacttcctgatcgtgcgcgcgctgtacctgtaatttagttcttgactctggagtcgactccagagtgtatcctacggctaatgagaaaattatcatttcccggagggtgccatgtcgactccagacgcgcaggataaaaaagttccacaattctcgtctttcaccatgcggccagcgaccgccccggcggagagctgctgtacagatcacgcctgcgccacagagtccgcccctgccgccgaagcgcttagcgacgcccgctatagctggcaagttgatggcatggactgcgccgcctgcgcccgcaaggtggaaaccgcggtccgtcaggtgcccggggtcagtcaggtccaggtgctgttcgccacagaaaagctgctggttcacgccgagggcgatgtccgcgctcaggttgagaacgcggtccgccaggcggggtatacgctgcgcgatgccgatgctcccgcagcagagcaaacccgagggtcgctgctgcgcgacaatctgccgttactgacgctggttatcatgatggccttgagctgggggctggagcaggccaaccaccctgccggtcagttggcctttattgccaccaccctggttggcctgtggccggttgcccgccaggcgctgcgcctgatcaagagcgggagctggttcgccattgaaacgctgatgagcgtcgccgccatcggggcgctgtttatcggcgccaccgcggaggcggcgatggtcctgctgctattcctgatcggcgagcgtctcgaaggctgggccgccagccgcgcacggcagggggtgagcgcgctgatggcgctgaagcccgacaccgccatccgtctgcgcaacggcgtgcgggaaaccgtcgcccagcgcgacctgcgtcccggagatgtgattgaagtggctgccggcgggcgtctgccggcggatggccagctgctgtcgccgtttgccagctttgatgaaagcgccctgaccggcgagtcggtgccggtggaacgtcaggccggggaacgggtagcggcgggcgccaccagcgtcgaccgcctggtgcagcttaccgtgatatccgaaccaggcgacagcgccatcgaccgcatcctgaagctgattgaagaggctgaggagcgtcgggcgccgatcgagcgcttcatcgaccgcttcagccggatctacaccccggccattatggtggtggccttgttggtcgctattgtcccgccgctgttcttcgccagcgcctggctgccgtggatttataaagggctgacgctgctgctgatcggctgtccgtgcgcgctggtcatctccacgccggcggccatcacctccggcctggcggtcgccgcccgccgcggggcgctaatcaaaggcggcgcggcgctggagcagctgggccaggtgcgccaggtggcgttcgataaaaccggcaccctgaccgtcggccagccgcaggtgacttcggttattgccacggccgaagttgacgacaacgcgctgctggcgctggcggcggcggtggagcaaggctccagccacccgctggcgcaggctatcgtccgtgaagcgcagcggcgtcagctgagcattccgcttgccagcggccagcgggcgctggcgggctctggtatcgaagccgaagtcaacggcagccgcatcctgatctgcgccgccagcaaagccgccccggcagagcatgaggcgcagatccagcagctggaaagcgccgggcaaacggtagtgctggtgatgcgcggcgagacgctgctcggcattctggcgctgcgcgataccctgcgcgacgacgcgcgtcaggcggtggatgctttgcatcagttgggcgttcagggggtgatccttaccggggataacccgcgcgccgcggcggccatcgccagcgaactggggctggaattccgcgccggtctgctaccggcggacaaggtcaacgcggtgatagcgctgaatgccgacgcgccgctggcgatggtcggggacggtatcaacgacgccccggcgatgaaagcggccaccatcggcatcgccatgggcagcggaaccgacgtggcgctggagacggccgacgccgcgctgacccataaccgtctgaccggcctggcgcagatgatttccctggcgcgcgccacccacgccaatatccgccagaacatcgcgattgccttagggctgaaggggattttcctcgtcaccaccctgctcggcctgaccggtctgtggctggcggtgctggcggataccggcgccaccgtgctggtaacggctaacgcgctgcggttattgcgtaagaagttgtagcatagataccggcttccctgctcgcgctgcgcttagcagggctacggttccagaccgtcgggtagcccggataaggcgctacgcgccgccatccgggagaggctcagtggcttttgcggatcaggtagcggtacggcagggcttcggtttcctgggccaccagctcatgctccataaagcggcagaatcccgggatatcgcgggtggtggccggatcgtcagcaataatcagcagcgtctcgcccaccggcatcgtccgcacggttttacgcaccatcatgaccggctccgggcagcggagtcccagggcatccagggtgtggtcaggagtggagaaaagttcgctcattttagtctcacgtcaacaaaacggccctagtttaccccctgctcgccagtacgcaagccaggttaacgtttgcgcgaaaaacaaccattgcattacgccggcaacgcagtatcatgcagccgtttttaattgggttccctcaccccaacgttccgctgccgattgctcattcacctgaagcatgacgggcataaaaaggtcacaatatgaatccgtttactaccgtacagcgcaaaaaagcgctcgtctggctttcgctatttcatttgctggtcatcacctccagcaactatctggttcagctgccgatctccatctttggtttccataccacctggggcgcgtttagttttccgtttattttcctcgccaccgacctgacggtgcgaatttttggcgccccgctggcgcgacgcatcattttcgcggtgatggtcccggcgctggccatctcttacggcatctccgcgctgttctacatgggcgaatggcagggctttgccgcgctgggcacctttaatctcttcgtcgcgcgcatcgccgtcgccagctttatggcctatgcgctggggcagatcctcgacgttcacgtctttaaccgcctgcggcagagccgccgctggtggttggcccctaccgcctcgacgctgttcggcaacatcagcgataccgtggcgtttttctttatcgctttctggcgcagcccggacccgtttatggccgcccactggggggaaatcgccctcgtcgactacagctttaaagtgcttatcagcatcattttcttcctgccgatgtacggcgtgctgttaaatatgctgttgaaaagactggcggataaatctgatttgtcggcattacagccgagttaaaggtactcgcgggctgatgtgttaagatagccggatgagccattagtggccgtttatcgaaaggaagatgtcaatgcgcaatttggttaaatatgtcggtattggcctgctggtgatggggcttgccgcctgcgataacagcgattcaaaagcgccaaccgttggcgcagcagcggagagcaatgccagcggccaggcaatcagcctgctggatggcaagctgagcttcaccctgcctgcgggcatggccgaccagagcggcaaactgggtacccaggcgaacaatatgcacgtctactctgacgctaccggccagaaagcggtcatcgtcatcgtcggcgacagcaccaatgaagatctggcggtgctggcgaaacgcctggaagatcagcagcgcagccgcgacccgcagctgcaggtggtgagcaataaaccgctggagattaaaggccataccctgcagcagctggacagcatcatctccgccaaggggcagaccgcctggtcttccgtgatcctcggcaaagtggatgacaagctgctgaccctgcaggtcaccctgccggcggataaccagcagcaggcgcagaccgaagcggaaagcatcatcaacaccctcaccatccagtaattactggcctggtgcgctggcctccggttcgctaaccgggggccgtttttttagccgccagcccaacagcagcgccgccatcaccagccccgccgcggcgagataaatcatcgagatcccggtccacgccatcagcaatccggccagcggcccgctgacgcccaacgacaaatccataaacacggtataggtcgccagcgccgacccctgattgtgctgcggcaccgctttcaccgccaccacccccagcgccggaaagaccagcgaaaagccagccccggtaaggaaagtaccgattttcgccatcatcggcgtatcggcaaagccgaccagcagcaggccgatcgcctccacgctaaagcagagcatcgccacgttcagcccgccgagtcggttaatggcgttgggaaacagcagccgcgcgccaacgaacgcgcagctgaataatgtcagcgcgaaagccgcgccgtcccaacctttggcgtcataaaatagcgtgataaaggtggcgatcaccccaaagccggcggaggccaacgccagcgccatgccgtagggccagacccggccgagcaccgcgcgaaacgacatcgctttgcctttggcagccttcaccgccgcgcggggcagcgcgcagaggatagccaccagcgctaccgccataatgaccccggccagaccgctgaggccaatgtgcgaatagcacagcacgccgagcggcgcgcccatcgccatcgccccataggtcacaatcccgttccacgagatcacccgcccgatatgcagcgaaccgaccacgccgacgccccacagcgtcgagcctgtgccggcgaagctctggccgataccaaggatcacccgtccgaggcataacagcagcaggctaatcagtggccagccgctgccccaggcggccagcagatagctcaaaccgctcaaaaagcagccgccgaggccgaagacgacaatctttttgggccccagcaggtcggcatagcgcccggcatgcgggcggctgagcagcgtggcgaaatattgcaggctaatcaccagcccggcccagaaagcgctaaagcccatgacatcatgaacatagccgggcagcaccgccagcggcaggccgatggtgaggtagctggcaaagttaaagataacgacagagacaatccgcagattgaggcgcagtccattaagcgccggttcggcgacgggttcgggcatcaggttccaccagatttcgacaaccagctttcactattaccacgctgtcggcggaaaagcagccctcctttcggaatattggcagtcggcgaaccgctacacttatctggcgcgactcataaaaggaatacctatgtcccctccgcaggctgataaagccgggcttcatattttacttaagctggcggcgctggtgattatcctcgccgggatccacgccgccgccgatatcctggtgcagctgctgctggcgctgtttttcgctattgttctcaacccgctggtcacctggttcattcgccgcggggtgcggcgtccgttcgccattaccctggtggtgacggcgatgctggtgatgctcaccgcgctgctcggcgtgctggcggcgtcgctcaatgactttgtcgccatgctgcccgatttcaaccgcgccctgacgcgcaagatcctccagctccaggagtatctccccttccttaatctgcatatcaatccggagcggatgctgcggcgcatggattcagaacggctgatgacctgggccacgacgctgatgacccagctttccggggcgatggccagcatcgtgctgctggtgatgacggtgatctttatgctgtttgaggttcgccacctgccctacaaactgcgttttgccctcaataacccgcgcctgcatatcgccggattgcaccgggcgctgaaaggcgtcacccattatctggcgctgaagacgctgattagcctgtggaccgggctgattgtctggctggggctgctggcgatgggggtacagttcgccctgatgtggggggtgctggcgtttttgctgaactatgtgccgaacattggctccgccatctccgctatcccccccatgctgcaggcgctgctgttcagcggcatctatgagtgcctgttggtaggggcgctgtttctggtggtgcatatggtgctgggcaacatggtggagccgcgcatgatgggccaccggctggggatgtcgaccctggtggtgttcctgtcgttattggtctggggctggctgctggggccggtgggaatgctgctctcagtgccgttaaccagcgtctgtaaaatctggatggaaaccaccgtcggaggcagcaagctggcgatcctgctcggcccgggccgtcccaaaagccggctccccggctagcggcgtttcaccggccagaagatggtcaatacgccggcgacgatgatcgccacgcccagcagcgattgccagtagaacggctcatgccagccgggcagccagatggcggcggcccacacgaggatatagctcaggctcagtagcgcatacgctttcgacagcggcaggcgatggagggcaaagtaccagcagaccatcgacagcaggtagcccagcaggccgaaaaacaggccgaaagtcccgggctggaaatgcagcagatgctggagaaatgccacaatatcggtcagcggcggcaaggccaccatggcgctgcgcagcagcaactgcgcggcgctgacgaggccgacgctgagtaatgcccagaaaaagcccatcagacgctggtccccagaatgacaatgcccacgacgatcaacccgacgccaagccagtggcgacgggcgaccggctcatgccagatgccccagcccgcgagggtaacccagacgaaattcagactcagcatcggataggcgatgctgaccggaatagactgcaggacgctcagccacagcagcatgccgcagcccagacataacagcgccatccccaaccagaagagtatatggcgactccgccgtccgcgacgggacgggcgggtcgcctgtttctggcagagctgtccggcgcagctcagcaggctggcgcacaccagacagatccagacgctcattgcggcaggtactgaaggaaaacgacccggcccagctcgtaggcgttatccggtttcggtaacggtaagtcgagcatactctctcctttatccatcaacagcaccagcgagaccggcccctgctgacgatgcgcggccagccagtcggcaaaaccggcctggctgacaaagcttccctgagcatccggccagtcgagaccgtacttcagctcaccctgtttgtcgaacataataatatcgcttcgcttcagctcccaggccaggccgccggcgatcccaacgttgttggtcaggacgtaacggctgggctgcagggattcgctgacgatatccacgaggaactgcggctgtttgctgtcgataacccggtccgggatggcgaagcccaccagcagcgccaggccgagcggacagagcgcggcgaggctccagcggcggccagagtctttcatcgccagccagcccatcagcgcccagacggcaaaagcgatcgccgccagcagacatttatacagctcaatcttggtccacaccggcctatgcatgaagccccacggcgagaccaccagcacggcgataagccccagcaaaccaacgcccaggttgatcatcccgttgatgcgcaacgctttcgcgccggtctttgcggcctccagcgcgtagcgggccatcaggatcgacagcggcgcaaagcacggcaggatataggtcggcagtttgcctttggcgatactgaagaacaggaacggcatcgccacccaacctaacagatacagcgcgccgcgggcctcatcgcgctcaagccagccacgctttagcgcccccggcagcagggccagccacggcagactgccggcgatcaggaacgggatgtagtaccagaacggcgctttgtgctgggcgtctttttcagcaaaacgctgaatatgctcgacccagaagaagtagcgccagaagtccggctcgcgctgggcgatagccagcccccagggcagcaccaccagcgtacagacgatcaccgccagccagccgtaggtcagcacttcacgccagcgtttacgggcgatcacccacggcagaacgcccaccaccggcaccgccagcgccaggaagcccttggtcatcacccccatcccgcaggcgacgcccagcagcacgtagcccagtattttgccgctgcggctgtgcgcctgcgccgcaccccagaagctgcacatcgccagcgccagccacagggtgatcatcgggtccagcaccgcataggtgccaatcgcatacaccagcatcgcggtgaggaagataaccggcgacatgatagctacccgcttatcacgaaagatccgccacgccagccaggccaccagcagggcggtcatggtgatggcgaagaccgacccgaagcgtacgccgaagttattatggccaaacagccactgaccgatactgttgatccagtaaccggcaatcggtttttcgaagtagcgcaggccgagaaaatgcggtaccacccagtcgccggtggccagcatttcacggctgatctccgcgtagcgggtttcgtcgggttgccaaagcaaacggaaattgagcggcagcagataatacagcgcaaacagcgcaatcagagagacgccatagcgaatgcttttcatcaaatacccgaagtcagtaattgttcacgtccgagccagccttcccggccagccagttcaccacgaaccactttgcctgagggcagctcgctaaagtcagcgggcagcagctggctcagtgggcaaaactgaatttcttcttccgccgccatggtcagtagttcattaaactgatcggcgtaggcaatgccttccacttcagcgtgaatggtatagaccggcacgcccgcatcgcgatggatgcaatccagcaggtagcggttaaagccggcgatatccaccgccgtgcccaccgcctcgtcccaggtcggcaacgtgaccgggatctgcacggtaccagagacgccgctgccgagctggggcagaaacggccgcgtgccgcgacagtcgctgttgtagagaaaatcgaaggattctttggctttaaccacccgctgatcggcgcgccagccggcgacggccgagcaggtcaccggccggccgatgatgcgctcgagctccagcaggccgcgctcaacctccagcgccagcctttcctgcggccagacgccgctccacgcctgccagctgtagtggtcccaggcgtgcaggccgacttcatgagattcggcggcggcgcggatcaccgcttcgttccctgcgccgatgcggcgccccggccaggcggtgccggccagcagaatatcccagccgtacagcgaggcggctctggaacgcagcatcttccacagaaacttcggttttaccaggcgccacaggtggcgccccatattgtccggcccgacgctgaagaagaagcttgcctggatcccatgccggcccagcagctccagcagccgcggaacgccgtcccgcgtgccgcgaaaggtatcgacatctatgcgtaagccgacctgtttcatggatttttatcgtccaccagttcaaccgtgcgcaggaagaagtccagcgtgtgttcgaccgtttcttccatctccaccttcggctcccagttcaggcagcgtttggcgttgcggatgctcggcttacgatgctcaacgtcctggtagccctttccgtagtaatcgctgctttccacttcacggaagccggcgaacggcgggaagcgatcgcgcagcggatgacgttcgaagcaggcgagcagcatttcggccagctctttgatgctcgcttcgttatccgggttaccgatgttaatgatctgcccgtcgcagcggccgtctttgttctcgatgatgcggaacagcgcttcgataccgtcgctgatgtcggtgaaacagcgcttctgcttgccgccttcgataagcttgatcggcgacccttccaccaggttgaggatcagctgagtgatggcgcgggagctaccgatacgcgcggcattaaggttatccagacgcggccccatccagttgaacggacggaaaagggtgaacttcaggccgttcttatcgccataggcccagatcacgcgatccagcagctgcttggagaccgagtagatccagcgctgtttgttgatcggccccaccaccaggttggagctatcttcgtcgaagtttttgtcggtgcacatgccgtacacttccgaggtcgacgggaagataatgcgcttattgtatttcacgcagtcgcggatgattttcaggttctcttcgaaatccagctcgaacacgcgcagcgggttgcgggtgtattcgataggcgtggcgatggccaccagcggcagcaccacgtcgcatttcttaatgtgatactcgatccactcagagtgaatgctgatatcgccttccacaaagtggaaacgcggacagtcgagaaaacggctgatggcgtcggagccgatatccagaccgtaaatctcatagttgtcgtcctgcagcaggcgctcggtcaggtggttaccgataaagccgttgacgccgaggatcagcacccgggtgcgacgcttaatcgccaccaccggtttgctgctgatcaccgccccggacaccaggcccagcgcctgcgccagctgagcgccctgcatgtacacgccgcgttcggtctggccggtgacaatctccagcgccccgtcctggcacgcgacgatcagcggagcaatggagagcacggtgcccggtttagctgctggcaaatcgtggcgaacgcgggatttccagacgataaacttgttcgctccggcgtagccgaaggcgcccggccacggatccgagaccgcacgcaccagattgtgcagggtctgcgccggcagctcccagtccagccggccatcttccggggtacgacgccccacataggttgcctggctgtgatcctgcggacgctcatcggtggtgccggcgaggatcgccggcagcgcccggctcagcagctcagtggcggcggcgcacagcttacgatgcagcgtcagggcggcgtcatccgcgccaatcgccacggcctgctgggcgacgatatcgccagcgtctgcgcggttcaccatccggtgtagggtgacgccggtttcgctttcgccattgaccaacacccagttcagcggcgcgcggccgcgatattttggcagcagcgaaccgtgcaggttgaacgcccctttcggcgccagattgaggatctcatcgcccagcaggttgcgatagtagaaggagaacagtacgtccggcttcatctcgcggatacgctcaatccacagcggatggttcacgtcttccggcgcccacaccggaatgccctgctcggcggcaaggcgcgccacggagccaaagaaatggttttcgccagggttatccgggtgggtgaaaatagcagcgatatcatacccggcgtccagcagagcctggataccggtgcagcccatatcgtgataagcgaagactacggctttcatgaacgatcttcctctttagatgccgtttccggctggcgaacaacacgttgaataaagtagcgggggcgggcgcgcacgtcgttatagatgcggccgatatactccccgagcaggcccataccgacaaactgggcgccgatgaacatgaacagcacggcgaagagcataaacaccccttccgccgcccactgtgggccgaaggccaggcgcagcaccaccagcagcaggccgaaggcgaagcccagcagggcaatcacgctgccgaaaatgctgagcagacgcagcggcgtggtggtcagacaggtcaccaggtcgtacatcaggttgatcaggcgcataaagctgtatttggagtcaccgaattcgcgctcggcgtgcatcaccgggatctccaccgcgcgccgggcgaaggtattcgccaggatcgggataaaggtgctgcgctcatggcagttgagcatggcgtcgatgatatggcggcggtaagcgcgcagcatgcagccgtagtcgcccatcgctttgccggtggtgcgctggatcaggcggttgatcatcttcgacgcggttttacggaagatgctgtcctgacggttctggcggacggtgcccaccacgtcgtaaccttcatcagccttcgccaccagccgcgggatctcctccggcgggttttgcaggtcggcgtcgagggtaataatcagatcgccggttacatggctgaagccggccatgatcgccgagtgctggccgtagttacggtttaacagcacggcgacgacgtggctgccttccgcctcggcggcttcggtgagcatgcgcgcggaatcgtcgctgctgccatcgtcgatcaacagaatttcatattgccgccccagggtggcgcaggcggcatccgtacgacgaagcagttccggcaggctatcctgttcgttataaaccgggataaccaccgagaccttcttcacgggagggtaagtaagcatatcaacgtcctgacaactggcgcagtgcggagataacgcgagtgacatcgtcatcggtcatatccgggaacaacgggagagagcagatgcgggcgctgttccattcggtattcggcagggaaacctcagggaagcgctcgcggtaatatttttgcgtatgggccgcacggaagtgcaggccggtgccgatgcccatcgccttcagcttttccatcagcgcgtcgcggctgatgccgcacgcggcctcatcgacgcggatgataaacagatgccaggcgtgctggtgatcccaggtcgggacgctcagcggtttaaacggcgtgtccgccagctcgcgcaggtagcgctgggcaatctcggtccggcgctgattggcgtggctcagtttttccagctggaccagcgccagagcggcgttgatatcggcaaggttgtacttgaagcccggggtgatcacctccgcctgcggcgcgcggccgtgggtctggcgatcataagcgtccacgcccagaccatggaatttcaggctacggatgcgggaggccagctcgtcgtcgtcggtgacaatcagcccgccttcggcgcaggtcatgtttttgatcgcgtggaacgagaaaatggcggtcccctgccagcccacgtggcggcctttataatgggtaccggccgcatgggcggcgtcttcgatcaccgaaatgccatggcgctcgcccaccgcgcgaatggcgtcgatgtcggctggcgcgcccgcgtagtgcacgggaattatcgctttggtacgcgaagtgatcgccgcttccaccgcgtcaggggtaatcatcagattgtcgttatcgacatcgatcatcaccggcgtggcgcccagcaggcagatcatattgagagtggagacccaggtctgggacggcgtaatgacttcatcgccggggccaatacccagcgccatcagggtcacatgcatcccgccggtcgctgaactgacggcaatcgcatgacggttgccggtcagctggcagaatgccgcttcaagtgcctgattcttcggcccggtggtgatccagcccgacgctaaaacttcacgcagggctgccagctctgcgtcgcccatcgacgggcgcgaaaaaggcaaaaaatcgctcatcatcatcctgttctgtagatgacccacgcacgaatctgggtcgttagaataaaatatcctgcgcctgcggacttaaacgaaattaaaatgaagtgagttcagcacggcattccatttcagggtatctcgaccactattaatgtagtcgaccttgcttaggataatattaagaaattaatatttcttcggaataagaaataaattcttaataaacagtatgataggagttttttatggcagaaatttgacggagatgcgttcctgtcacgaaaaagagaacaggaacgcaatagttgaaattaaacgagaactaaaccagttcacaatttattattctgtcattgtcacgcttaatgacaaaaagttagcgcagatcacaaagttatttctgctgaattacaaatttgcaggaaaatccgcaggcaattcgctcgccgggcaattaatgacctcgtcattatccgcgccacagtcgcgaatgaaggtgatagtggcgaactcgtcaatcacttccgtcgggtaggccgggccggcatcgcgatacgaattcatcagcggaatatggtcgttctggaagcagatagttttttccgggttattcatgatccagcgcgggaagaaaatagtgccgtggaacagtttgtcgcccaggttgacgatcaggctgacgtcggtgccggtcggttcggtccaggagattttgtagatactttcccccacccgcacaatgtacgcttcctgatctttcacccagcgattgccgacgatgccgctgtgaatacggtagtcgagggtgtggccatttttgacgtaaatctcgtagttccagccgttgtcgtaggtatagaccagatgtttaccgataaagccgctgaggtcatgtttgtcgaaagtgctcatcatttattctcctctgttttgttgaggacagcatacgtctttaaaaaatgaatgaataacgctatgtttggattaaatacattcaaattttagattgattatgcacaagacaaccctggagcagtgggcgttactcgaaaaggtagtggaattggggagctttgccagagcggcggaggagaccaatcgcagtcagtcatcggtaagctataacctcgcgctgctgcaggagcgcttaggcgtggcgctgctggcgccgtccggccggcgggcggtgctgacgccggctggcgaactactgctgaatcaggtcaagccgctgctgcaggccttcgcctacgtcgagacgcacgccgccactctgcgcaacggggcgcggacccgcctggatctggtggtcgacagtattttcccgcgccagcggctgttcgcgattttacgccagtttcagcagcgctatccgcagacccaggtcaggctcaccgaagtgctggaaaacctggatgacgagagcgcggcgcggacggaagccgatgtgatggtgttgacccgccgccaggatattaccggccgcggggagtggctgatgaatattgatttcatcgccgtcgcccaccgcgaccaccctctcgccgcgctggacggaccgctggaggatagcgcgctggcgccgtggccgctggtgcgcattgccgatcagggcggcgatagccaggcgccgcgagacgcctggaccttctccaccattgatgccgccattgatgcggtgatgtatcaggtcggcttcggctggctgccggaggagcgcattcgcccccatctcgaccagggcgtgctgaagcggctgcccctcagccatggcgcgcgccgcgcgacgccgctgcatctgatcgtcaagcgggacctggcgccgatcgacgaacaggtggccacgctgctggcgttgttccggacgccctgaggggtaaggcggcgctggtcgcctgggcgtaatgatacgattttcttatactttccggcgcaatattgatccaggttactctcaaagtatgatgaatcactaaaatcgtcatactttcctgtcgttgagattgccgtcttgtctattatccgcctcaccctgctggcgctgctcgcctgcgtccctctgctggctcaggccgcgccgtaccagctcaccaccgcctggccggttaacgtcggcccgctgaatccccatctctatacgcccaaccagatgtttgcccaaagcatggtctatgaaccgctggtgaagtatcaggctgacggcagcgtacagccctggctggcaacccgctggcgtcactccgccgacggcaaaacctggtggttcaccctgcgcgacgatgtggccttctccaacggcgaaccgtttaatgcccaggccgcggcggccaattttcaggcggtgctggccaaccgccaacgccacgcttggcttgagctcgccaaccaaataaccgacgtgcgggccctcagcgccaccgagctgcagatcaccctgaaaagcgcctacgcccccttactgcaagagctggccctgccccgcccgttccgcttcatcgccccctcgcagtttatcgatggcggcaccgccaggggcattaaagccccgatcggcaccggcccgtggcggctggcaagctcgcagctcaatcagcgcgatgtgctggtgcgcaatgagcgctactggggtcgcaaacccgcgctacagcaaatcaccatcaaggtgatccctgacgccaccagccgggcggtggcgttcgaaaccggggaaatcgatatgctctacggcgatgaagggctgctgccgctggacaccttcgaacgctttcgccatcaccccggctacgtggcgcgcctatccgccccggcggagacggtaatgctggcgctaaacgccagccagggcccgacccgcgagcaggcggttcgtgaggcgctcaactacgccgtcgataaacagacccttgtcgatagcgtgttgtatggcacccagcaggttgccgacaccctgtttgccccctccgtcccttacgccccgcagaatctgacgccgcgccgttacgacccgacaaaagcccgcgccctgctggaacaggccggctggcagcagctggagggccagccctggcgacaaaaagccgggcaaccgttggcgattgagctggcgtttattggcaccgacgcgctggctaaatcgatggccgaaattattcaggccaatctgcggcaggtcggcgtgcaggtcaccctggtgggcgaggaggaaagcagcatttacgcgcgccagcgcgaaggccgcttcggcatgatcttcaatcgcacctggggcgcgccctacgatccgcatgcctttttaagctcgatgcgcgtcccttcgcatgcggattaccaggcccagcgcggcctgccagacaaggcactgattgataaagagattagtgaagtgctgaccaccggggacgaggcgcagcggagaaaactgtaccatgatgtgctgacccgtctgcatcaggacgcggtgtatctgcccatcagctatgtctcgctgatgtcggtcgcgcgccaggaggtcggggagatcccgttcgccccggtgaccagcgagatccctttcgaccagattaccccggtaacgccataatgctacgctatattttacgccgcctgctgctgctgatcccgctgctgctcgccgcctcagccatcatctttctgctgctgcggctcggcgccggcgacccggcgctggattatttacgcctgtcgaacctgccgcccactgaagagatggttgcctcgacccgcgagctgctggggctcaaccagccgctggcaatgcagtatctgcactggctatggcgggcgctgcacctggatttcggtctctcctatgccacccagcgcccggtgctggacgacctgctgcacttcctgccggccaccctgctgctcaccggcgcggcgctggcgctgatcctcgtcacctccctgccgttgggcatctgggcggcgcgccatcgcgatcgcctgccggactatatcgtacggctgattgccttcctcggcgtctcaatgcccaacttctggctggcctttctgctggtgatgctcttttccgtgcatctgcagtggctcccggcgatggggtatggcgactggcagcacctgattttgcccgccgtctccatcgcctttatgtcgctggcgatcaacgcccgcctgctgcgcgccagcatgctggacgccgccagccagcgtcacgtgatatgggcgcggctgcgcggattgagcgcgcgccaggtggagcgccgacatatcctgcgcaatgccaccctgccggtggtgaccgccatgggcatgcacattggcgagctgatcggcggcaccatgattatcgaaaatatctttgcctggcccggggtcggccgctacgcagtttccgccattttcaatcgcgattacccggtgatccagtgctttaccctgatgatggtgacggtgttcgtgctggctaatctggcggtggatgtgcttaacgcggcgctcgacccgcgcctgcgccgccacgaggaggtgagcgcatgagagggctacaaagttttcgctggccgataaagctcgccctgttagtcatcgcgctgctggcggtcatcgccatcggcagcggctggtggctgccctgggatccagcggcgattgaccttcagcagcggctgctgccgccgggcgcagcgcactggctcggcaccgatcatctcggccgggatattttctcacgcctgctggccgccacccgcgtttcgctgggggcggtgatggcttgtctgctgctggtgctgctgatcggcctggcggtcggcggctgcgccggactgctgggcggccgcgccgaccgcggcctgatgcgcatcgccgaactgtttatgacctttccgacctcgatcctgtcgttctttatggtgggagtgctgggtaccgggctgaccaatgtgatcctcgccattgcgctgtcgcactgggcctggtacgccagaatggtgcgtaacctggtggtttccctgcgccagcgcgaatttatcctcgccgcccgtctgagcggcgccagccagtggcggctgttcagcgaccatctggccggcgcggtgatcccctcactgctggtactcgcctcgctggatatcggccatatgatgcttcacgtagccggcatgtcgttcctcggtctcggcgtcagcgcgccgacggcggaatggggggtgatgatcaacgacgcccggcagtatatctggacccagccgctgcaaatggtctggccggggctggcgctgttcatcagcgtgatggcttttaacctgctgggcgacgcgctgcgcgatcgtctcgatccccacctgatcgcggagcatagccactgatgccgcagaagatccaactggaagagatctcgcttgccgctgaccgaccgctggtcagcgacgtctccttcaccctgcgccgcggccaggtgctggcgctgctcggcagcagtggttgcggaaaatcgctgacctgcgccgccgcgctgggcctgctgccgcccggcgtcaggcaaaccgccggccgggtgcttctcgacggcattccggtgcacggcgaacagctgcgcggggcgaccatcgccaccatcatgcagaacccgcgtagcgcctttaacccgctgcagaccatggccgcgcatgcccgggaaacctgccgggcagcgggtcgtgaaacgaatgacgccgtgctgctggcagcgatggaggaggtcggtctggacaatccgcgggcgctactgaagcgctacccttttgaaatgagcgggggcatgctgcaacggatgatggtcgctctcgccctgctcagccgcgcgccctttatcatcgccgacgagccgacgaccgatctcgatgccatcgcccaggcgcgcatcctcgacctgctggcggatattgtcgccaggcgcggtctgggactgctgctggtgacgcatgacatgggcgtcgtggcgcgcctggcgcatcacgtaacggtgatggagaacggtcgcctcgttgaacactgcgatgtgaatacgctatttagcgccccgcggcacccgctcagccagcgcctgctggccgctcatctggcgttatacggtctggagaaaacaccatgaatttactcagcgctaccggggtgagtcacgattatcctcaccacggcagggtcctgcatgcgatccatctcgccatcgcccccggcgaaacggtggccctgctcggacgcagcggctgtgggaaaagcaccctggcgcggatgctggtgggtctggaaacgccgcagcacggcgatattgcctggcgcggcacgccgctggccgccctgaagggcgaggccatcggcgccttccgccgtgatattcagctggtatttcaggatgccttcagcgcggtgaatccgcgcaaaacggtgcgcgagatcgtcagcgagccgctgcgccatctgttgtgcttgtcgcgtgaggcgcgtgcgcggcgggtggaagagatgctgctggccgtcgacctcgcgccgtcgctgctcgataagcgcccggcgcagctcagcggcggacagctgcagcgcgtctgcctggcacgcgccctggcggtacggccgcagctgttgatccttgatgaagcggtttcaaatctcgatctgctgctgcaggcggagattatcgccctgctgaagcgtctgcaggcgcagtttgacaccgcctgcctgtttatcacccatgacctgcggctggtggagcgcttttgccagcgagtgctggtgatggagcacgggcgcatcgtcgaaaccgcaacggttagtctaccgctacgcctgcgctctcctgccggacaggcgctccagcaggcggtgctccccccttttcctgccactctgcttaacgaggccatgccatgcagcgcgtaaccctgacccttgatgatgacctgctggccgccctcgatgcgctcagcgcccgccgcggctaccacaaccgttcggaggcggtacgcgatattctgcgcgacgccctcaaccaggatcctccgtcgccggaatcacggcgcgggtatgccgtcctgtcgtacgtgtatgaacatgagaaacgcgaactggcgagccggctggtggccacccagcatcatcatcacgatctctccgtcgccacgctgcatgtgcatatcagtcatgacgactgcctggagattgcggtgctgaaaggtgatatggccgaggtacagcattttgccgacgacgtgattgcccagcgcggcgtgcgccatgggcatttgcagtgtttagcggatgattaattatttgaaaattcttgggtggtttatcaacagttgataaaccatataaattatacgctttgttaattatcccgcttcgccaataatggcgcctcatttaacgatctcgttatggcgaggctcctgcataaatacaagttaccgccctgttggtatcgagagagaccactcagggaaatacaggcttccatcgaatcaaggtgttgccaaggtaacttctggcggtcatgaccgttcagatacgttatgcagtgctaaaaccaggacgtagggatctgcctgcgctaaccctgtcttgttcgcccctatgagtgattttttatagggatttttaaacatgtcttccattcaactctgcgacgcccatcaggcgacctctggcttcgacggcgatgcgatcgcccagtacatgcgtaccgattttattacgctgcaggaacatctcagcgttcatgaggcgcgcgaacactttatctcccagctggccagcgatgatattcccgggcaggtgtttgtcgtcgccggcaagaagctgcgtggcagcctgtcggtcaaaaagctactccaggaaacggatatcaaccagtctatccgccacctgatggacagctgcctgtttcgcgtcaaacctgacgatgagcgccagcaggtgattgccgagctcagcgagcgcggcctcgacctggtccccgtcgtcgataaaggcgagctggtcggctgcctgatggagaaggagatcgcccatctgctggaggatgacgtcaccgaagatgctcagctgcagggggcaacgctgccgctggaaaaaccgtacctcgagatcagcccctggacgctgtggaaaaaacgctcggtgtggctgctgctgctgttcgtggccgaagcctacaccagcagcgtactgcagcatttcgaagaagccctggaatcggccatcgcgctggccttctttattccgctgctcatcggcaccggcggcaacagcggaacgcagatcacctcgacgctggtgcgctcgatggcgctgggggaagtgcgactgcgcgatatggggcgggtgatccgcaaagaggtatcgacctcgtttctgattgccctgaccctgggcctggcgggctgcctgcgcgcctggatgatggggattggcatggaaatcacgctcatcgtcagcctgacgctggtgtgcattaccctgtggagcgcgattgtctcctcggtcattccgatggtgcttaagcggatcggcattgacccggcggtagtttccgcgccgtttatcgccacgctgattgatggcaccgggctaattatctatttcaaaatcgcccagtattttcttgggttgaactgatcatatacgtccgggcaccagggcgcccggacgcgtagattacccttccaccagcgcctgcgcgcaggcccaggcgcttgaccacgcccactggaagttataccccccgagccagccggtaacgtccatcacttcgccgataaagtagagacccggcgccttacgcgcctccatagtacgcgacgagagttcgttggtgtccacgccgccgagggtcacctccgccgtccggtagccttcggtgccgttcggctgcacgcgccaggcggttaacgtctccaccagcgtctgctgatcgcgaacgttcagttgcttgagcgtcacatcaggtatctgccccagctgctgcagacactccaccagccgcttcggcagctgcatcgccagggtgttcttcaggctctggttgggatgcgcgctgcgctgctcgttaaggaagtcatcaagatcgcagtccggtagcagattaacggtgacgaactcgccgggctgccagtagctggaaatttgcagcaccgccggtccggaaaggccgcggtgggtgaacagcagattttcgcgaaacagagtgccgttctcggcggtaatggtcgacggcaccgacacgccggagaggacctgcagctgctcaagcaatggcttgtggagggtaaacggcaccagccccgcgcgggtcggcagcaccttcaggccgaactgctcggcgactttatagccaaacggcgaggcgccgagccccggcatcgacagaccgccggaggcgatcaccagctttttggtcatcagcgtttcgccgttcacctgtagccggtagccttgttcatcgcgctccacgctgaggatttcgctgcgcagacggatctgcacgccgcccttttcacattccgcgagcagcagattgacgatctgctccgccgaatcatcgcaaaacagctggccgagggtcttctcatgccaggcgatgccatatttgccgaccagctcgataaagtcccactgggtgtagcgcgccagggcagatttgcaaaaatgcgggttttggctcaaataggccgtcggttcaacatacatgttggtaaagttgcagcggccgccgccggacatcagaatttttcgccccggctttttgccgttatccagcagcaggacgcggcagccgagctggcccgcctgcgctgcgcaaaacatacccgccgctccggcgccaacgacaatggcatcaaacctttccacaccgcgttcctcgttccccaattgtcgggttttgtaaatatttcactctggtcacaccagcgggaaaaatcccgcattagatacatcattgaaagatataggattactcccaacagggtaaaacctaaacaggaagaaaatcaaaaaaagtctatatttcactttgcccgcgccgctaaagtcactgataatgcgccgcgttcatgtcctcaaaatggcgtaacgtcctatgctacatttatttgccggtctggatttacataccggactattattattgcttgctttagcttttgtactgttttacgaagcgattaacggtttccatgataccgcaaacgcggtggctacggttatctacactcgcgcaatgcgctcacagctcgctgtggcgatggcggcgctcttcaacttcttcggcgttctgctgggcggtctcagcgtagcctatgccatcgtgcatatgctgccgaccgatctgctgcttaacatgggttccgcacatggcctcgccatggtgttctctatgctgctggcggcgatcatctggaacctcggcacctggtacttcggtcttccagcttccagttctcataccctgattggcgccatcatcggcattggtttaaccaatgcgctgatgaccggtacttccgtggttgatgcgctgaatatcccgaaagtcatcggtatttttgcttcgcttatcatctcgccgatcgtcggtctggtgatcgcgggcggcctgattttcctgctgcgtcgctactggagcggaaccaaaaaacgcgcgcgtatccacctcacgcccgcagagcgtgaaaagaaagacggtaagaaaaagccgccgttctggacccgtatcgcgctgatcctgtctgctattggcgtgtcgttctctcacggtgctaacgatgggcagaaaggcattggcctggtgatgctggtgctgatcggcgtcgcgccggcgggtttcgtggtgaatatgaatgcctctggttacgaaatcacccgtacccgcgatgcggtcaacaacgtggaaaccttcttccagcagcgtcctgaactgctgaaaaaagccaccggcgtcgatcagctggtgccttctccggataccaataccgcggccaatggcgagttccactgccatccggcgaacaccatcaacgcccttgaccgcgtcaaaaccatgctgaccggcgttgagaactacgagtcgctaaaaccggaacagcgcggccagctgcgtcgcatcatgctctgcatctccgacaccaccgacaaggtggcgaagctgccggatgtgagcgctgacgaccagcgtctgctgaagaaactgaaaaccgatatgctgagcaccatcgagtacgcgccaatctggattatcatggctgtcgcgctggcgctgggtatcggcaccatgatcggctggcgccgcgtggcgaccaccatcggtgagaagattggtaagaaaggcatgacctacgctcaggggatgtcggctcagatgaccgcagcggtttctatcggtctggcgagctacaccgggatgccggtttccaccacccacgtactctcctcctcggtagcggggacgatgctggtggatggcggtggtctgcagaaaaagacggtgaccagcattctgatggcctgggtgctgaccctgccggcagcgattatcctttcaggcgtcctttactggctctccctgaaactgatttaagcgttattcgttcaaaacgggccagcttgctggcccgtttttttattctgaaacgttagtgccagatcatcagcgcaatcaggctcaccaccaccaggccgcacagggcgctggtcaggataaactggcgacgaacacgttcgcagcgacgaataaattcatcatcgtgatggtcacggtagcgctgggcatagatataccacaccagccgcatctgtttgctgggctgcccgtgcgaggtaaaaaagccgccgccatcaacatactgatagagcaagggatcgcaaccacgtagcaccaccaataatgcacgcaacgatgagaagtagcgtgccatattcaccacacaaacgacacacagggcccaaaacagcgcaatagtgctgatcatacctcctccccggcgacccgcctacggagaaaacctccgcggctaccgctccccaaataacccacgacgataccgtaaagagtgcgattccgatcacatttatttttccgaccggctcattaaatagtgtaggagatccattaatttttttaccacaaggttattcgttatcaatacgtaagacggataaatttgtttaacttttaggtgaacccagtgcattgacggagtgcggggggcgctataaggtaggaaatatcttctacaatgaagtccttaaaggctaccctcccgcgaatgtagcacgcaggacgcgggcgaaacggcagcgccagctgtcaggtccaatggtcatcgacaaacttatggaaggagtaacactatggcttacaaacatattctgattgcagtagacctgtccccggagagtaaagtactggttgaaaaagccgtttctatggcccgcccgtataacgcgaaagtctcccttatccatgtggatgtgaattactccgacctctacaccgggctgattgacgttaacctcggcgacatgcaaaaacgcatctccgaagagacccatcacgcgctgaccgagctctcgaccaacgcaggctatcccatcaccgagaccctgagcggcagcggcgaccttggtcaggtgctggtcgatgcgattaaaaaatacgatatggacctggtggtctgcggccatcatcaggacttctggagcaagctgatgtcctctgcccgccagctgattaacaccgttcatgtcgacatgctgatcgtcccgctgcgcgacgaagaagacgaataaccgtctcgttttatccgcgcaatacgcccgccgatgcgggcgttttttattttcgctttccctcgccatgcggcagaacttcaatccataaaatcgccattcaattagtgtgatcaaccagttattcggcgaaatatctatataataatctattccataagccaataaccgcagcatggcgagttatcagacattttcggcgcgttctggcatacgcgttcatactttttgggaaagtaatacaaggcgaaggaatatgaatacaactgcacctacgggcttgctgcagcaacctcgtccgttctttatgatcttctttgtggagctctgggaacgttttggctattacggcgttcaggggatcctggcggtcttctttgttaaacagctgggcttctctcaagaacaggcctttatcaccttcggcgccttcgcggcgctggtttacgggctgatctccatcggcggctacgtgggcgaccatttgctggggaccaaacgcacgctggtgctcggcgccattgtgctggctatcggctactttatgaccgggatgtcgctgctgaaaccgcaactgatctttatcgctctcggcaccatcgccgtcggcaacggtttgtttaaagccaacccggcgagcctgctctccaaatgctatccgccgaaggatgcccgtctcgacggggcatttaccctgttctatatgtcgataaacatcggttcgctgctgtcgctgtcgctggcgccggtgatcgccgaaaaatttggctacgcggtaacctataacctgtgcggcgcggggctgattatcgcgctgctggtctacttcgcctgccgcgggatggtgaaagatattggctccgagccggatcatcgccccctcagcctacgcaatctggcgctggtgctggccggtacggtggtaatgatttttctctgcgcctggctgatgcataacgtgatgatcgccaacctggtgctgattgttctgtcggtcgtggttattgcgttctttttccgtgaggcgtttcgcctcgataaaactggacgcaacaaaatgttcgtcgcctttattctgatgatcgaggcggtgctgttttacattctgtatgcccagatgccgacctcgctgaacttcttcgccatcaacaacgtccatcatgagatccttggctttaccatcaacccggtcagcttccaggcgctgaatcccttctgggtagtggtcgccagcccggtgctggcggcgatctacacccatctcggtcataagggtaaagacctgaccatgccggtgaaatttaccctcgggatgttcctctgcgcgctgggcttcctgaccgccgcggcggccgggatgtggttcgccgacgcccaggggttaacctcgccgtggtttattgtgctggtctatctgttccagagtctgggggaactgttaatcagcgctctggggctggcgatggttgccgcgctggtgccgcagcatctgatgggctttattctggggatgtggtttctgacccaggccgccgctttcctgctgggcggctatgtggcgacctttaccgcggtgccggaaaacatcaccgacccgctgcagaccctgccggtctacaccaatgtgttcagtaaaattggcctggtgacgctgggcgtcacggtggtaatggcgctgatggtgccgtggctgaaccggatgattaataccccggccagcgccgaataaccgtttgagatggccgatccgctggcgccgtttgtttaaatattgcggttcccggctcgcgctacaatttggtagcccggataaggcgctttgcccgctatccgggtgatatcacaacggcgaaaaattacgccggcgtaccggcgtaaatatcaaaccgatgtcctttggtcaccaccgcgttcggcgtggcgacatccgccagcggcggcgcataatccgggcgcttgactaccactcgtttggtcgccaactgacgcgctggcgccaacagaccatcggcgtctaaatccggccccaccagcgactgaaagacgcgcatctctttcttcaccagcgcgcttttctgcttatgcgggaacatcggatcgaggtacaccacctgcgggcgcggggtgatatcggttaacgccgtcaggctggaggcgtggatcagctgcagccgctcctgcagccagccgccgatttccgcgtcagcatagccgcgcgccaggccatcatcgagcagcgcggcgaccaccggattacgctccagcatccgcacgcgacagccgaccgacgccagcacaaaggcatcgcgtcccagcccggccgtcgcatcgacgacatccggcaggtaatcgcctttaatacccaccgctttagccaccgcttcgccgcggccgccgccaaacttgcgccggtgggccatcgccccgccgacgaaatcgacgaagatgccgccaagcttgggctcatcgcgcttgcgtagctccagatgctccgtcgtcagcgccagcgccatcgggttatcgtcatcctgctccagcccccagcgggcggctaaaacagataaggcgccgtcaccggcgcctgtttcatcaattaagcagatcttcacgtagcaatcagcctttgatcccgtaatgctccagcatcgcgtccagctgcggctcacgcccgcggaagcgtttgaacagctccatcggctcttcggaaccgccgcggctcaggatattgtcgaggaacgactgaccggtttcacggttgaaaatcccctcttcttcgaagcgtgagaaggcgtctgccgccagcacgtcggcccacaggtagctgtagtagcctgccgcatagccgccagcgaagatgtggctgaaggcgtgcgggaagcggccccaggtcggccccggcaccacggcgacctgctttttaatctcggccagggtctcaaggattttcgctccctgctccggtttgtactccgcatgcaggcggaaatcgaacaggccgaactccagctggcgcagaataaacatcgccgcctggtagtttttcgccgccagcattttctccagcagctcctgcggcagcggttcaccggtttcataatggccggagataaacgccagcgcttccggctcccagcaccagttctccataaactggctcggcagctcgaccgcatcccacggcaccccgctgatgccggaaaccccggcggtgtcgatgcgggtcagcatatggtgcagaccgtggccgaactcgtggaacagggtgatcacttcgtcatgggtgaacagcgccggcttgccgttgaccgggcggttgaagttacaggtcaggtaggcgaccggcttctgcagggaaccatccagtttacgcatctggccgacgcagtcgtccatccacgcccccccgcgcttatgctcgcgggcatacaggtcgagatagaagctaccgcgcagctcgttgtgttcgtcatacagctcgaagaagcgcacttccggatgccacacatcgacatcggtacgctctttagcggtaataccgtaaatgcgcttaaccacttcaaacaggccgctaacggctttgttttccgggaaataggggcgcagctgctcatcgctgatgctgtagaggtgctgcttctgtttttcgctgtagtaggcaatgtcccacggctgcagctcatcgacgccaaactcggctttggcgaaggcgcgcagctgggccagctctttttcgccctgcggacgggcgcgttttgccaggtcggtgagaaagtcgagcacctgctgcggatccttcgccattttggtggcgagggatttatacgcatagctgtcaaagcccaacagctgcgccagctcgtgacgcagggcgaggatctccgccatcaccgggctgttatcccatttcccggcgttcgggccctgatcggaggcgcgggtggaataggcgcgatacatctcttcgcgcagcgcctggttatcgcagtaggtcatcaccggcagatagctcggaatatccagggtcagcagatacccttcctgctctttggcctgcgcctgagcctgagcggcggccagcgcgctttccggcatgccggccagatcggcgacatcggtcaccagcttgttccagcccatggtggcgtcgaggacgttgttgctgtactggttgcccagctcagagaggcgcgcggcgatttcaccgtagcgtttctgcgcctccggcggcaggccaatcccggataattcaaaatcgcgcagcgcgttatcaaccgcttttttctgcgcggtattcagcgtggcgtagttatcaccatcgcgcaggtcgcggtaggctttatacaggccttcatgctggccgacccaggtgctgtactcggagagcagcggcagcgtctgttcgtaggcctcacgcagttcagggctgtttttaaccgaattcagatggctgacaggcgagaagatgcgtcccagcacatcgtccacttccgccagcggctggcaaagattttcccagctatacggcgcgccatgcgccaccgcgctttccaccgcggcccggcaatcctccagcgctttggtgaccgcagggaccacgtgctctggtttgatcgcagaaaaaggcggcagggagaaaggcgtcaataatggattggtcatatgcgctgtcctgttgaaaagggtgaatgaagcgcgcgtccggcgcttatgcatgagatctagaatgggggatagttgggggaatttcaatgacgggcggtgcgtcagcctgggtattgctgcgataagtccgcccgttgccggaaaagcgcgacacgcagtgcagcgtgccggaaaccacattaatgccttttttgcgccatctcccaggccgccgacagattcagccgctgccagaattgctgttcgggggtggtgccggatagcgggtaacccgccggcagcgcggtgttgaccatcagcgcccgacgctgggccgctgacagatgcggcagggcatcttccagcagcacttccgccccctccggcacctgtaaacgcggctgcggacccttctgctgcggcagatcgtaggtcatggtgaagcgagagaaatcacgcatcgccggctcgcgccagggatcgtctttcacgctgctcttcgcgcactcggcaagcgatgtgccgcaggccttcgccagcgcggcgcgcagctgatcgcgggcttcgttaaataatacccggtagtgcggatcgttaagatagtgggccacgttgcgctcggccaccattcgcgagccgatcacgtccagcgggtagtggacgcccagcacgatgcgcgagtagccatagcgggcgccgcgcgccaccagcgcgtcgtagcgctccgggatcatcgccgccagcaacagcgcatcggtatagccggtgttggtgtggccgctggggaacgagccgccgtcggcggtgtagggctggttatctttcaccaccacatcgtcaggcaccaggtgaatggtgttgccctgcaccagaaacggccgcggattgttgaagtgctttttcgcctcgccggtgctgacctccgaggctttgatcaatgctgccgctttccccagcgcgccctggtcataggcggtcagaaacgctttgccaaggcgtggccccagcgcgtcgctgaggaagtagaggtagctaatgccttccgcatcggccagcgcctgacggcgcgtggtctgcacggcgtcgcgattgatggcggtcaccgtcgccagattctgcttcacgacggtctccggcagggtgctgaacgccgacagcagcgtaatgcccgcctgctggttggcccgggtctggaagtcatagccgctggccttcagccaggcggtatcggcctgagtttggttttgtttggcgtgcgccagccgatcgcgggtcagcgcggcggcatccccctgcagagcgtggcgtagctgcgccagcgcctgttgctcaagatcgtcatacgcctggctggaggcagccggcgtcacgctattggcgagggccgccgccctgttcagcgggatgtctttagccagaaccggttgcgccagcagcagcgcgacggccagcagcgagagttgccttttcattatttttccttttattcaaataattaccttgcctgtacccgacgctagcgcggccgtttgacgtttttatgacagcgttatgttttgcaacgcttttagcagaaatgaaacagcgcggcggcgcagcggtaatctcggccgatctgcggtaaactatcggttaacttgtttacttcccggaatctctgcatccatgctcagttatcgccacagctttcacgcaggcaaccacgccgacgtcctcaaacacaccgttcagagcctgatcattgaatcactgaaagagaaagaaaaaccgtttctctacctggacactcacgccggcgcgggccgctatcagctgagcggcgagcacgccgaacgtaccggcgagtatcttgaaggcatcgcccgcatctggcagcaggacgacctgccggcagagctggagccgtatatttcggtcgtagaacacttcaaccgtaacggccagctgcgctactacccgggctcgccgctgattgcccgccagctgctgcgcgagcaggacagcctgcagatgaccgagctgcacccgagcgacttcccgctgctgcgcgctgaattccagaaagacagccgcgcgcgcgtcgataaagccgatggctaccagcagctgaaagccaagctgccgccggtatcgcgccgcggtttgattctgatcgacccgccgtacgaaattaaaaccgactatcaggcggtggtcaccgggattaacgaaggctacaaacgcttcgccaccggcacctacgccctgtggtacccggtggtgctgcgcgcgcaaatcaaacgcatgatcaaagagttagaagccaccggcattcgcaaaatcctgcagattgagctggcggtgcgtccggacagcgaccagcgcggcatgaccgcctccgggatgatcgtcatcaacccgccgtggaagctggagcagcagatgaataacgtgctgccgtggctgcacagcaaactggttccgaccggcaccggccacgccaccgtcagctggatcgtaccggagtaatcgcaaccatcggtggaaccttttaagcctcgcgctacaatcgcggcaatcaacgattaaggacatatgggcatgagcaaacattatgattacctcgccatcggcggcggtagcggcggtatcgcctcaattaaccgcgcggccatgtacggccagaagtgcgcgctgattgaagccaaagagctgggcggcacctgcgtcaacgtcggctgcgtgccgaaaaaggtgatgtggcatgcggcgcagatccgcgaagcgattcatctttacggcccggactacggtttcgataccaccatcaaccattttgactgggagaagctggtcgccagccgtagcgcctatatcgaccgtattcatacctcttacgacaacgtactgggtaagaatagagtcgacgtgatcaaaggcttcgcgcgctttgtcgatgcccacaccgtggaagtcaacggcgagatcatcaccgctgaccatatcctgatcgccaccggcggccggccgagccacccggatattccgggcgtcgaatacggtattgattccgacggtttcttcgaactgccggcgctgccgaagcgcgtggcggtggtcggcgcaggctatatcgccgttgagctggcgggggtgattaacggcctcggcgccgaaacccacctgttcgtgcgcaaacacgcgccgctgcgcagtttcgatccgctgatcgttgagaccctggtggaagtgatgaacgccgaaggcccgcagctgcataccaatgcgatcccgaaagcggtggtgaagaatgccgacggcagcctgacgctggagctggaagatggccgcagccagaccgttgactgcctgatctgggcgattggccgcgaaccggcgaccgacaacttcaatctggcggcaacgggcgttaaaaccaacgataaagggtacatcatcgttgataaattccagaacaccaacgtgccgggcatctacgcggtgggcgataataccggcgccgttgagctgacgccggtcgccgtggccgcaggccgtcgtctctccgagcgcctgtttaacaacaaaccggaagagcatctggactacagcaacatcccgaccgtggtcttcagccatccgccaatcggcaccgtcggcttaaccgagccgcaggcgcgcgagcagtacggcgacgatgccgtgaaggtctacaaatcttccttcaccgcgatgtataccgccgtgacctctcaccgtcagccgtgccgcatgaagctggtgtgcgtcggcccggaagagaagattgtcggcatccacggcatcggcttcgggatggatgagatgctgcagggctttgcggtggccctgaagatgggcgccaccaaaaaagacttcgacaacaccgtcgccattcacccgacggcggcagaagagttcgtcaccatgcgctaagacgcgatcgccggatgataaaaagaagcccccaggggcttctttttttatgctcaggccacgccgttattgccatggcgcataaacgccgggcgctgattgagcgccatataccagcgctccacggctggcatctccggatgggcgaaaggggtcattttccagcgatgcaccgacagccccagcacgatatcggccagggtgaagcgctcgccggctacccacgccccggtacgctgcagctgcgcttcaacaatgcgcacgcagtgggtccaggcggcaatactctctttaatcgccaccggatcctgaaagcgcggatctttacgcaccagccccataaaagcatggcgccaggcagtgttaaactcggtcgcctgccagtccatccagtgctccacctcggcggcgggctgcggctcggcgggcagcagatcccagcgctccgctttgcgcgccagatagcggcagatactgttcgactcccagagcacgaagtcatcgtccagtagcaccggcaccaggctgttaggattcagacgctgaaactcaggcgtatccaggggcttaaatccgctgccgtaatcttcctgctggtacgccagcccggcttcctcgcaggtccacagcactttccgtacattaattgaagagcgtttacccagaattgttagcatcgtcagcgattcctcagccataaaagacagttcattcactctactctattgccagccagcaacaaggcagagcgctggataatgtgtatagttgattccagcctgtttgccgaaaaggaacccgacatgttgaccccttttaccgttttgatgcctgcaaatattcgttttggccgtggtcaggccgagagcgccgccccctggctggcgcaacagggcggcccaatcctgctggtgcatggcgccagcccgcagcgggcggcgtttctccgccagcagctggaggcgctgcagcttgcggtcacgacgctggcgataagtcgcgaaccctggcttagcgatatcgagcagggcgtccagctggcgcgcgagaaagggatcagagcggtggtcagcctcggcggcggcgcggtgattgacgccggtaaggcgattgcggcgctggtccccgccgccggcccggtgatcgactatctggaggtggtgggaacgggccgtcagctggaagccagtcccctgccgttcgtggcgatccccaccaccgctggcacgggcgcggaggtcaccaaaaatgcggtgatcaacgttccggaacagcagcggaaagtgagcctgcgcgacgaccgaatgctgcctgacctggcgattgtcgacccggcgctaaccgacaacgcgccgcggagcatcaccctgagctccggcctcgacgccctgacccaggtgatcgagccctggctctgcagccgggccactcccttcaccgatgctctctgccagcaggcgatcccgcggggaattcgcgcgctaaaaatcctgatggaacaagagtgtccggccagccgcgacgagatggcctgggtcagcctgtgcggcggactggcgctggcgaacgccgggctgggggtgatccacggcctcgccggcccgctgggcggcctgagccgcgcctcgcacggcgccctatgcggcagtttgttgccgtttggcctggcgctcaatgagtcgcagatcaacgaccctggcctgcgccagcgcgttaacgatgtccgccgctggctggccgacgggctggacgtccctgtggatcaggtctgggacagtctgcgggaatggagccatcgcgctggccttggcaccctgcgcgacctcggcgtagcgcgcgatgcgctggaaccggcggcgctggccgccagcacctcctcatcgatgaaggccaacccggtcagcctgagcggcgaacagctgctggagatgctggaggcggcgtgggagtgagcgccccgggataaaattttgttgcataatgaatgctccgaatttcatctgcgccaggatgtacaatttttaattacttatcaacagcgtactttgaaatggcagcttttcttctcggcggaaaagcgtgatctcacgcacagtttgcttcacactcaccgaagcgactgtctacgcttaatagacaaggccgggtatgcccggccccgaactcacgctatccggaggtccgtatcgctatgttcagccagaaattacgccacgttgaagacgacgagttaaggatcgacatcgatccctgctacgaagccgatccgtacgaattaaagctggatgagatgatagacgctgaaccggagcctgaggtgatcgaggggcttccggcgtccgatgccctcaccccggcggatcgctatcttgagctgtttaccaacgtgcagaaatcacgcattttcgcggacagcaaaaccttccccgactgcgcgccgaaacacgatccgctggacatcctgcggaactaccgcaaggtcaaacgccagcccgacttcgatctgcggcagttcgttgaggacaacttctggctgccggagagccagagcgacatctatatctccgaccccagcctgaccctgaaagaacacatcgacaagctgtggccggtgctgacccgcgagcctcaggatcatatcccgtggtcatcgctactggcgctgccgcaggcctacatcgtgcccggcggtcgctttagcgaaacctattactgggactcttatttcaccatgctggggctggcggagagcggccgggaagatttgctgaaatgcatggccgataactttgcctggctgattgaaacctacggccacattccgaacggcaaccgcacctactacctcagccgctcgcagccgccggtgttcgccctgatggtcgaactctttgaagaggatggcgtgcgcggcgcgaagcgctatctggaccatctgaagatggagcacgccttctggatggacggcgccgagtcgttgatcccgcaccaggcgtatcgccacgtggtgcgtatgccggatggctccctgctcaatcgctactgggacgaccgtgacacgccgcgggatgagtcgtggcgcgaagacgtggagaccgcccgacactccgggcggcccgccaatgaagtgtaccgcgacctgcgggcgggcgccgcgtccggctgggactactccagccgctggctgcgggatatcacgcggctggccagcatccgcacgacgcagtttatccccatcgacctgaacgccttcctgttcaagctggagacgaccattgccaacctctccggcctgaagggcgatcgcgagacggaggcggccttccgccagaaggcccaggatcggcgggcggcggtcaaccactatctgtgggatgatgagaacggctgtttccgcgattatgactggcgccgtgaacagctggcgctgttttccgcagccagtatcgtcaccctttacgtcggcctggcgacccacgaacaggcagaacgccttgccgatgcggtgcgggcccgcctgctcacccccggggggatcatggccaccgaatacgaaagcggtgagcagtgggataaacccaacggctgggcgccgctgcagtggatggcgatccagggatttaaacgttacggccaggatccgctgggagatgagattgcctggagctggctgcagacggtcaaccacttttacaagcagcatcacaagctgattgaaaaataccatattgccaccggcgtcccccatgagggcggcggcggggagtatcccctgcaggatggctttggctggaccaacggcgtggtgcgccgactgattggcctgtacggtgagccaacctagtcgggctgttcccggcggctttctcctgctatgttcagaggattcgccctgcccggaacgacgcttatgcctgaacttctgacgccgcgcctgcgctgctcaccgctgcagctggacgactggtcgttttttctttccctgcagcaggatccgcaggtcatgctctacgtcgccgatccccgaccgcaggcggccatccgcgaggcgttcgattcgcggctgccgccgtggacgcccggggatgaacactggctgtgcctggtggtgcgcgacaggctgacccataccccgctcggcctgaccggctaccagcatcatcagcgcgacattgccgaggttggctttctcttcgccccggcggcgcagggtcggggctacggctacgaatcgctgcgcgcgctgtgcgactacgcctttaccaccggcggcgtccgccgcctgaccgccagcgtcaccgccggcaacgaggcgtctaagcagttactgctcaaagccggcttccggctggagggagagctgcgggaaaactactggctcaacggacgctggcacaacgactggctgttcggtcggctgcgtggggagggcgatgcgccgtagcgcaccgccggtcacaggctgggggcagtcaggatcagaggaacatcccgcccgagacttccacacgctgcgcgttcatccacgccagctcatcgctgagcagggcggcgatggcgtcgccgatatcatccggcagcccaacgcgccccagcgcagtctgggcggcgatatgccgattcacctcggcgttatcgcgcacctccccgccgccaaagtcggtctcaatggcccccggcgcgatgatgttcaccgatatcccccgtccgcccagctctttcgcctgatagcgggtcagaacctccatcgcccccttcatcgcggcgtaggccgcatagcccggcagggcaaagcgcgccaggccgctggagacattgaggatacgccccccatcctgcaggagaggcagtagacgctgggtcaggaaaaacggccctttgaactggatattcatcagctcgtcaaactgcgcttcgctggtctcggcgaagggcgcgttgagtccgatcccggcattgttcagtaaataatcaaaggttgtgcgtccccacttctgcgccagcacctgcgccacctcgctggcgaatgcgtcaaatgttgtggaatcgccgacgttcagcgctaatgctgccgctttgacccctttttgctctatttccgccaccacgtcgagggccgcctggcggttgctgtgataggtcaaaagaatatcggttccctttgccgccagcttcaacgcggcgtttttacccagaccgcggctgccgccggtcactaaagcgatacgttgtgtcatcagaagacccctttcaggttgcgttgtgattgtgttgtagcttattaactgctcatgcaacaataaatacgctacattgcgttttactgtttcattaacaacaacaataggcgatcggcatggataaaattcatgcaatgcagttattcattcgcgtagcggatctggagagcttctcccgcgccgccgaaaccctggcgctacctaagggtagcgtctcgcgacagattcaggccctggaaagccatcttggcgtgcggctcctgcaccgcaccacccgccgggtccagctcacccaggatgggatggtctactacgagcgggcgaaagatctgctgagcaacctcgacgaactggacggcatgttccagcacgatccggcgagcatcagcggccggctgcgggtggatatgccggtcggttttgctaaaaaaatggtgatcccgcatctgccgacttttttacagcaatatccgggcatcgaactggagctgagcagcagcgatcggcaggtggacgtgatccgcgaggggtttgactgcgtggtgcgcgtcggcgcgctcaaagactcagggctgattgcccgcccgctgggcaagctgacgcaaattaactgcgccagcccggactatctggcgcgttttggctatccgcaatccctggaggatctggcggatcatgccctgatccactacgccagcaccctcggggtccgtccccccggctttgaggtaatgatcgacggcgcggtgcgctgggtaaaaaccggcggcatattgacggtcaacagtacggaaacctatcaggcagcctgtatcgccgggctggggattattcaggtgccacgcaccggcgtgcgcgaggcgttacgcgccggcgacctgattgagatcctgccccagtaccgcgccgagccgctgccggtctcgctgatctacccgcaccggcgcaatctctcccgccgggtaaatctgtttatggagtggctgggcggactgatgaaagcgtatgtcgattgagcggcgcggccggaaaacgggcggcggggagaggcattcctgcaggatacggcatttaaggtatactttttgctgaatctcgctgtaaaaaaggaagaaattacgtatgacgccggaaaacgacgatcgacgcccgccacaggaaccggatacgcagccggagaaaagcaaaagcacgctcgaggcccttaatgacaccgccgtcgggcaaaaagccagccaggcgctgaagaccgtcaccggaacggcggccaaagtgcagcgcaacccggtgatcgcccatctgctgcgcgccgcagagcgcttcaatgaccggctcggcaatcagtttggggcggctatcacctatttctcgttcctgtcgatgatcccgatcctgatggtctcctttgccgccgccggcttcgtgctggcctggcacccaaccctgctgcaggacattttcgacaaaattctgcaaaacgtcagcgacccaacgctggcggccacgttgaaaaacaccatcaacaccgcggtgcaacagcgcaccgccgtcggtctggtcggcctgctggtcgccctctattccggtattaactggatgggcaacctgcgcgaagcgatccgcgctcaatcgcgcgacgtctgggagcgccggccgcaggacgaggagaaaatctgggtaaagtacttccgcgatcttatctcgctgatcggtctgctggtggcgctgattattacgctgtcgatcacctccgtcgccggctccgcccagcagatgattatctccgcgctgtatctcgacaacattgaatggctgaaacccgcctggcggctaatcggcctcgccatctcgatttttgccaactatctgctctttttctggattttctggcgcctgccacgccatcgtccgcggcgcaaggccctgtttcgcggcacgcttatcgcggcgattggctttgaaatcataaaaatcgtcatgacctggacactgccggcgctggtgaaatccccctccggggcggcgttcggatcggtgctggggctgatggcctttttctatttcttcgcccgcctgacgctattctgcgccgcgtggatcgccaccgcggagtataaagacgaccggcggatgccgggcaaaacccaccgctgaggtattgcgaggatgaataaaagaggcaaaattcatcctcgcgcttgatttcagcagataaatccagcatgtaacttttatttaactcaaaactggttttattctctatctttttaattgtgtgaagcatttcatagaactatttttactggtgtaaaaattatccgctttttgcctcttttttgcccattttccgcgtttgttacagattgaaatgtccctgtggctgtggctatatggcttttcgttcgcgcaaaaataagaaagatctatgcaagccacagccaccactctcgaaaacacgcaggaaaccgccccggtcaactcacgcaacaaggttgttgtcgcctcgctcattggcaccgccattgagtttttcgacttctacatctatgccaccgccgcggtcatcgtcttcccgcatatctttttcccgcagggcgatgccgctgcggccaccctgcagtcgctggccaccttcgccatcgccttcgtcgcccggccgatcggctccgcgctgtttggccacttcggcgatcgcgtcggccggaaggtcaccctcgtggcctcgctgttaaccatggggatctccaccgtggtgatcggcctgctgcccggctatgaaagcattggcattgtcgcgccgatgctgctggcgctggcgcgtttcggtcagggccttggcctcggcggggaatggggcggcgcagcgctgctggctacggaaaacgccccggcgcgcaagcgcgccctgtacggctccttcccgcagctgggcgcgccgatcggcttcttcttcgccaacggcaccttcctgctgctctcctggctgctgaccgaccagcagtttatggagtggggctggcgcgtgccgtttatcttctctgcggtgctggtgatcatcggtctgtatgttcgcgtctcgctgcatgagaccccggtcttcgccaaagtggcggcggcgaaaaaacaggtcaaaatcccgctgggtaccctgttgaccaaacacgtccgggtgacggtgctgggcaccttcatcatgctggccacttataccctgttctacatcatgaccgtctactcgatgaccttcagcaccggcgcggcgccgaatggcctgggtctgccgcgtaacgaagtgctgtggatgctgatgatggcggtgattggctttggcgtaatggtgcctgtcgccggcctgctggcggacgcttttggtcgtcgcaagagcatgattatcatcaccacgatgattattttgttcgccctgttcgcctttaaaccgctgctgggctccggcaatccgctgctggtcttcgccttcctgctgctgggcttaagcctgatgggactgacctttggcccgatgggcgcgctgctcccggagctgttcccgacggaagtgcgctacaccggcgcgtcgttctcctataacgtgtcgtcgatcctcggcgcttcggtcgcgccgtacattgccgcctggctgcagggtaactacggtctcgcggcggtcggcacctatctggcggcgatggcggcgctgacgctgatcgccctgctgctgacccacgagacccgccaccagtcgttgtgatccttcgccctgacgcccccggcgtcagggctctcctctactttttcatctgcgacaaaatggtccgacactggttgctatcgccctccgccggggagatcagcgccagcagcgcggcggccggcgtcaccagggttgccagcgccgccgctaccgcgccgcggacaatcagcggcccggccttcacccccgcctgcggcgatttaaaggtgccccggacatacagcggggaacgcagggtgatcacccgaaagcctttgctttccggatcgatggtcaggtccagctgctcggaggcgaagctggcggtcccggtcacattgatcagcgcgttttctgtatcgaaggcaaaaatctgcggccgggcgacgccgttggttacgtcgatattggccgcagcgcagtttacccgaacctcctcatcgccaaaaatctggccgatcaggtagttaccgacgttaagaccgaggatttccatcaggttgcgactgatcagtccgtcgttcatcagcagcttcaggttaccgttgctgttgccgagcagggccgccaccgagttgccgctgccgcgcagctggacgtcgccattcatctcgccgagggttttctgcatcatctcgacgtttggcatcagcgccttcagcttcaggcgtcgcgcctgcagattggcctcaccctgcagcggctttttatcgccctgcaggtgtacgctgccggcaatcgacccgttggccaggccaaagcgcaccggctgcaggcgcaggtcaccatcctccagaatcacatgggtcgacagatcgctgatcggcagggtgccgccgtgctcaattctccggcccttaaagcgcacatcggcatccatcacctgccacttgtcggtttcaaagcggtccgccggcagcactttacccgccggctgcggccggtcccccgcctggcgcgaagcgcttttcttcgtccctttgccggaatcgacgccgattaatggcccgaggtccgccagacgcagctgcttcgactccatatcgccgctgagtttcggccgcggcttgccggtggtgtaggtcagggagccatgaatgtcgctatcgccgattcggccgttaaaattctgatagttaaagcgcatgcggtttttttgcgtaaagtcggcgcgcaggcggccgtcggtggagaatgacggcgtctccggcagcagcacgccggtcaggtcgtagagatcgcgcagcgagtcgccggcgaattttagccgcaggtcaatgccgccgacgttgagcgggtcgctgaccgtgccgctgaacgctacccgggtgttaccggagtggaagtcgccctgcaatgggaagggggcgcttgcgctgcgcagggccagcatgccgccgattttcccgttgccggtgaccggctggcccttgtagcggcccttcagcgacagaccaaagacatagtcgcctggtttcgccgcgctatggcgatcctttgtgccggtcacttcgctgaacggcagcggtttgccgaggggatcgacgaggatggtgatatcgctgcgggtgatcttgtcgtcaatggcgatagtcccgcgatcaaagagaatattatcgaggcgaaaggaccagctggagggcgcgctgtcgcccgaagtacgcttatcgcccgccagctgaaaggtccagttattgttgtcttccgcaaggcggatcaaccgtacgtcgggctgctccagcttgatccacggcaggtacaccgttttgctcagcagcgccagcggggcaagggtcgcctccacccgcggcagatggatcatggtcacctggggaatggccggcgggttgcccagcacgatatcctccgcgtgtacgtggggccacgggatccagctgcgccagccgcgctcgtccggctgccgctcccagaccacgccgagatcgccgcggatggcgaacgggcggttaagttcggcggacactttctgattgatcgtcggcttcagccggttccagtcaaaggtggccagcacgataaagaaaagaacgatcagcaatagtatcgttcctgtgatgataaccaacgttttacgggttctgctcatccctactccgctccttttgcatcacgtcagtcctgaatatagtcaaaaagcggcgtttatcctggaaatgcgcttttcgtcacattacgcgcgtcaggtcaaaaaaataatggaacgatgttttaatatgattgaccagcaaaacagcgcagcgcacactagcgcttatatcgattccattgcaggttctggctatgtctaaaaaaattgccgttattggcgaatgcatgattgagctgtcagagaaaaacggggccgttaaccgcggctttggcggcgataccttaaacacctcggtctatatcgcgcggcagacggatgccagcgcattgagcgtccactacgtcaccgccctgggaaccgatgcgttcagccagcagatgctcgacagctggcaacaggaaaacgtcaacaccgatcttatccagcggatggccgaccgcctgccgggactgtattacattgaaaccgatgacaccggcgagcgcaccttctactactggcgcaacgaggcggcggcaaagttctggctggagagcgatcgcgcggcggcgatttgcgaagagctggccactttcgactatctctatctgagcggcatcagtctcgccattctcagcccggccagccgcgacaagctgttcacgctgctgcgtgagtgccgcgccaacggtggcaaggtgatcttcgacaacaactatcgtccgcgcctgtgggccagccaggcggaaacgcagcaggtctatcaggagatgctcgcctgcaccgatatcgcgtttctgaccctcgatgatgaagacgcgctgtggggagaaaaaccggttgctgaggtgatcgcccgcacgcacgccgccggcgtggaagaggtggtggtgaagcgcggcgcggatgcctgcctggtctcggttagcgggcaaccgctgcgggaagtgccggccgtcaggctggccaaagagaaggtggtggataccaccgccgccggagactccttcagcgccggctacctggccgttcgcctgaccggcggcgatgccgaatccgccgccagacgcggacacctgaccgccagcacggtgatccagtatcgcggggcgatcatcccgcgggaagcgatgccgcagtaattctccgcacaaagcgctctccggccgccgctggcgcgccggagaggcgttaggttactgccccggcgggatgtcgctggcctcgctgtgggcgtcaaccgtatcggcgctgccgctagccgccgtggccgccggattcggcgccatcagtttttcccaggtggcctgcagctccttcatattgtattccggttcgcccttcggctgttgcagcaccagcgccatgtcctgcgagagctgctggcgcagatactggttcagcatgtccaccgtcagggagttgaggaactcctgacgcagcttctggtactgctccggcgcgatgtccaccacctgattctgcagggagcgcatgcgctggctcatcagaatgtcggtgtcagtgcgcgcataggtggcaaacagcttctgcagctcgaggcttttctgggcgataagcgcgtcaaactcctcctgaggcagcccgttgtcccgcactttcgccagctcgcgcgaaaccacgctcaggttgttgttcaggcgctcgcccggggaatcgatgttgatggcgcactgcgcgcgctgatatagcacccggcagtcaaagccaaggccaatatccttcacgttatttttgctcagactctgctgcacgtgccagaacagcgcttcacgggcgagatcgtcacgccagtagcgctgcagcgccgcggagtcgcggatcggctgccatggcgcatcccacatgatggacagtttgtcctgacgcaccgcgttggtcatgatgctgaccggtacggtaggcagcggcgataaggtcggcaccgctgcgggggtttcccgcttgcccttcagatcgccaaaggtcttattgatttgctcggcaacgctgcggctgtcgacattccccaccacgatcagcgtcatggcgtcgggggtgtaccatttttgataaaagtctttcagctgagccacgtcgatcggctgcttcagcggcgcggcggggtcatggcccagcatggtggaccctttcaggcgatagcgccaccaaccctctttggtatccagtggccaggtcgccaccatgtcgctgccctgcagcgcatgattgatcgattcaggcgtaatggccagtttaccgctggcgtccgccagccagctcagcgcctctttcaacagatcgttgcggttattgggcaggctgagattaaacatcgtgtaatcgtaggagacgatggccggcggcagaggacgcttcgggtcaatactctgctgccataaagagcgcgcctgcatcgtcggcaggctgccgctttgcgtcaacgccaggcggggaataaagcggctgaaaccgctctgctgagtgctttcgctcagcgagccaatattgacggacaaacggacttcgatacggtcgctgggacgttgcggcgtggccaatacctgccacgacaaaccattcgctaaggtcccttgttgccaggccggatcaggctggagcgcttctgcctgcacataaccggccgccgctaccatcagcaaaccgcccgttaagagtttaattgttgtgccctgcatgtgaacccctgatgaacattcctggttacaacagcaccccactgacgggctgccgaaaaaagtgagagtgaaatacgtcggttagaccacacggagacgaaaatgtcgcatgacaacgtaaaataatcatttcgtgtcattcccgccgggcgggaatgacctctaattatgcgcaggaggccgtactccagcaagggagtacgggcctaagaggaggatttaagaggataattcgtgcgttttgttcgccggaacacggttattcagaacgtcatccatctgtttggcatccagttctttcacccatttcgccaccaccaccgtggcaacgccgttacccaccaggttagtcagcgcgcgggcttcggacataaagcggtcgataccgaggatcagcgccagaccagccaccggtaaatgaccgacggccgagatggtcgccgccagcacgatgaagccgctgccggtcacccctgccgcccctttcgaggagagcagcagcaccaccagcagggtgatctgatggaaaatatccatatggctgttggtcgcctgggcgataaagactgcggccatcgtcagatagatagaggtgccatcgaggttgaacgaatagccggtcgggatcaccaggcctaccaccgatttacggcagcccagcttctccatcttgtcgagcattctcggcagcgccgattctgatgaggaggtccccagcacaatcagcagctcttcccggatatagcggataaatttgaagatgctgaagccggtggcccgggcgatgctccccagcaccaccaccacgaacaggatacaagtgatatagaagcaaataatcagctgccccagctgcaccagggtgccgacgccatatttaccgatggtaaaggccatggctccgaaggcgccgatcggcgccaggcgcatgatcatattgataatgccgaagataacctgggagaagctttcaatgacgttgaaaatcagctgacccttgctgcccagacggtgcagggcaaaaccaaacaggacggcgaacagcagaacctgcagaatgttgccgctggcgaaggcgccaatgacgctgcccgggatcacatccagtaaaaaggccactaccccttgatctttagcctgctcagcgtacaccgccaccgctttcgcatcgagcgtcgacgggtcgacgttcatcccggcgccgggctgcaccacgttgacgataatcagaccgataatcagcgcgatggtgctgaccacttcgaaatagagcagcgccaccgccccggtacggccgacggctttcatgctttccatcccggcgatccccgtcacgacggtacagaagataaccggagcaatcaccattttaatcagcttaacgaaggcgtcgccgaagggtttcatttgcgcgcccagttccgggtaaaaatggcccagcagaataccgatcgctatggccgtcagcacctggacatagaggcttttaaagatagaggttttcatagggtgtcctttgggaataaccacagagcaagaagggatatttgacgtctgtggcttaaaaataacaccctggaaacatttcagaaataactaacgccgaaagtgcaacgcaattgttaaaatctttgagctgactcgcacaagtcaacaaaacatttacaaatttacatcctcccgggccggggagagatagcgcgcgctgaatgcctcctgcggtaaagcgcaaccgaacagatggccctggagcacctcgacgcccgcggcttgcaaccagcggcgctgggcgtcgttctccaccccttccgccacgatacgcagcgacaggccgcgcgcgagctggatcatcgccggcaccatgctgacatcctccggcagcatatcgatgaataccttatcaattttcagaatatccaccggcagggccttcatctgctgcagctggtgcaacccggcataacccatgccaaaatcatccagcgcaatctgtaccccggcctcgcgcagcggtcgcaaccgggccatcacatcctgcggatcgtccatccggcagctctccgtcacctcgaggatgagggtgcccggggcgatgcggtagcgggcgatcagctttagcatctcctcgccgcggtcgtgttccagcagctggagcagggaaacattgaccgacagcggcagcataatcccctggctttgccaggccgccagctggcggcaggcctcttccatcacccagtagccgaccgggataatcagcccgcaggactcaatgcgctcaatcagcgacggcggtagcgaccagctgccatccgcctgccgctgacgcagcagtacctcggcgccgcagatctcgccgctggcgcaggccacctgcggctgcagccagatcgcgaactgctggttatcgagcgcggtcataatgtcgtgctcttccatcaggcggcgctgagccttttccatctgctcgggatcgaagaactcgatctggtttttgcctttacgtcgtgcggtgacggcggccgacaccgcgcgccggtaaaactgctcggcgctgagcccggcgtggaacatggcgatcccgacgctggcgtaggggcgcagctgcagcccatgcagcggtaaacgctcattaataatagtgagcacttgcttacttaacgttaccgcctgccacggttcggcgaggccatcggcgagaatcgcgaagtcatacccgctcacctgagccagcaccatctgcggcgggatcgcggcccgcagcttctccaccagcgtcaggagcagcatttcgcgctgactctccttgaggaccccggcggcgtcctgcagggtttcacaggcgacgacgatcagcgcggcgctctgcgggcgggccaccgtctgctccagcatcgccagcaaaaaggctttattcggcagctcggagaccgggaagcgggtcgactggatggacagctcatcatgctggcggaccaggctctgctggttgcggttatagctacgcaccagcataccgatctcgtcgtcatggtgcaggcgcgggagggtcagctgatggccaagacgctcctgctgggagagatcgttcagctcgcgggcgatacgccgcagagggcgaaccatcagccggttgatgcaccaggtgagcgccaccgtcagcatcagcaccagaagtaagtaagcagtcactaacgtagcaagggcgctcatgacgaatttatacatgcgataggagtcggcctgcagcaccagataggccagcggctgcgggttggccggtcgctccagcgaataaatgggcagcgaaatctgcaccggcagctcaaacagccgggtgacggttaccggcaccggccgctcggggataaatcgcatccgcagcgcctggaactggttcggcaataccacatccgcccggctgacgatgccagcaggctggatacggcttaaaatggcttccgcttccggaatatcggctttcagaatagccgcagacagcggttcgcgaacggatcgcgcgatactttctaactgcgtggccgtggtaaagcgactctgttgcacaaagtgaaacagcaaaatagtgcaaaaaaccaatacaaaggccatggacacgctcgcgaccatcgccatctgtttgattgtaagtgaacggctgacgcgcaacggtgttctccactgatactgaatacatacccggtatcaatccttcaatcccggtcgtttcaggctgattatatacttaaatccttcgcccacgcccgcgagggatgaagtgacgggatatttccgcgcggtggcgcggacgccgggatacatccccgacggccaacggtgggcaacgcctcacgagtatacgcgaagcgcgtcgcggagtggcgctctgtaacgtaattcagcctattctgctaccagtcggcgtagggcaccagcggctggggcggcatatccagatccccctgccagccggccgccgagtagcggacgtaaagcagcgcatggctcggggtgtaatccttcgcctgctgaatatcgaccgcggcgccgacgaaccagttgctggtcacccgccgctccaccagcgctctggcggtgtaaccgaatccatggctgctgcttccctcctccgtcagctcgctggcgcgctgccggtagtcggacgggatcaggttcagcagcggatagcgggcttgcgtctgggtgcgcgaatgggaccatgacaccgacccgccgagctcccaggaccagttctcggtgcgctgacgccaggtcaccggcacggcgaacgagagatactcctgtgggctgtaatagccgccctggccgagggtgtagccgctgagatctttgtcgtagtgccagatcatattgttgaggccgacggtgacgcgacgattattctcgttgatgaccttgtagtagtacccggtcatccagcgcacgcgccagttatccgccacgtttttaccagtcagcgagtcggcgcccagcgaggaccagatgccgtgagcctccccgcgatcgtagctcaggctcaggccgccgccgtcggcgcggacgccgccccaggtggcgccggtatggctgctgctgtccttctgcccgccaaaggagagcagcgagctggagataggccgccggtggacgttgaccgtgtaccccaccggcccgacgtcgctgctgtagctcagcccccccaccacatcgacgacattgaagcccatcggcgtggtgccgatatccccgctccaggtgtcattcttccagccgaccgccacgctggccccgctgtcggtctgatttttactgccgctggtacaggcgatctccccgcaggtgccccagctgggcgagtagctcccgtcgctgtgggtggaaaagctgccggcatccatattgaccaggtcggtgcggaagaacatccggccatccgccagcggagcatccacctgcagcatggtggtatgcgccttcaggtcggaatagccgccggtgccgctggaaccccagaagtcatgttccagggtgacgttcagatcctgctgacgataaaggtcggcggcatcgctgcggatcccgcgcttcagccagtcatcatggctgtcgttgcgcgtcagccgcgtaaaagtatcgttatcctgcggctgcgcgggggtaatgccggaggccaccatcgcttcccggtagtgcgtcagcgcctgctgcggcgccccgctctgggtggcaaagcgcgcggcatcgcgcagcaccagcgcgctctccatcgagggcggctgcgccttcgcctgcggcacaatctgattaaaaatccgttgcgcgtcagcggtatcgccaaggccagctcgcgccagcgccacccgccgctgcatgttcatggattcggtctctgcgcctttcagctgcatgacctgcgcccgggcggccggtttatcgccctcggccaggtagacttccgcaaggccgaggcgcgcatcgccgttgtcggcctcctgacgcagcacccgctgatagtcggcaatcgccgtctggctgtctccgcgctgctgcgcccagtcggccagcgtcagatcatagcgcaccgaggcgggctgccgtttgatgagggcgatcgcctgcgcttcgtcgccgctgtcgcgcagctggttggcctggcgcagcacccggtcgctttgcagacgcgcttcgagttcacgaatgttatccgtccacgcgctgcgcggcagagcggcgatttgcgccagagccagatcgtcctggtcgttccccgacaggtagagtcccgaggcgtagacccgttcggcgtcctgcggctggcggttgaccatcgtccgcatcagcgcgtcggcctcctggcgttcgccagcgctgaccagatcccgcgccagacggtaggttatccagacgctgtccggatccagcgccaggcgccgacgctgaacttccgccgcctgcgcccagttgccctggctctccagagcctgcgcctgtttctccagccggtcgttagtcaggctgcgctcaatatcatcgatactgcgccgctgagcgggagggaggccggcgatccaggcgctggctttctccggcgattcggcgcgatagaggttggccaggccgcgcaccgccaggttattgccgcgatccaggcgcaacgcctgctggtaatagcgctccgccgccgcctctttgcgcgccgccgcgacatcccccagccccagcacggcatagctgtcggtgcgatcgacccgctgcgcctgggcataatagttctgcgcctgcgaaagctggccggctttcagggcgttatccccctgctttatcagcagccagtagcggttagtttgcagcaggctgtcccacttgccgcggttcgggctgtcagggtccatggcaatcgctttactgagctgcgccactgcccgcgcgcggtcgccgcgctgggaataggcctggccgagagcgcccaccgcgtcgctgtcgcggctgtcggcctgaacggctttctgcagatccgcgaccgcctgcgtggtattcccggacttgaccgccgccagcccttccgagcgggcgcggaaagtcggatcctgcagctgcgcctgctgttggtcgagcagaacgcgggcgttcgccgccaccgagccggtgggaaactgcagaagaaattgctgcaacgcctgcacgctggccttactcaccggcatgcttttcacctcactgaaccacatatcggcggcgataccgcgtcccgaggccgatcgggccatctccgccagataggcgaacccctcctgcggtttgttatcggcgaacatctgcttcgccagcgaagtcagcaggctgacgttgcccggcgcgctggcgttcagttgtttcaactggctgacgccttcgctatggcgggccggcaggcgcgccaccagcgtccagtattcaatggcgacgtcaacgtcatccggcaccccgccgtacagtttttcataggcggcgatggcttcatcgaccttcccggccacgcccagcagtcgcgcctgctgcagcgcctggcggccctcgccggtgttgcttttcatctcattgcgcgacgccttcagctccggggagtccggcgccagcttcgtcagtcgttccagctctttttgcgccccggcggcatccccctgacgcagcagatagcgcatccgcgcggcaatcagctccgggttgttgggatcaatcagctccagacggtacagcgactggcgcaccaggtcttcacgattgctggcctcgccgaggcggacctgctccagcagatgctcctgggcaggcgtcgtcgccgcctgcgctaacggcagcagcgcaacgccgagggacagcgtgagtaaacttagtgagagcttgcgcattcctggttccagtcaggttgtaattcgccactcgccgtgaaacgaaaacggtgttgatcccaaccctggccgaacagcgtcagaactgcgctgtagtaggcatccgcgccgggatagttatcggcgacgcgctggcgttgcaccgaccgagcctcgtcgtcctgtaaaaacggcagcattgccgcggagaagcccactggcccctggccgctggttttgccggtggcgatattcactttctccgggggtaccccctgctccgtggtctgcgccgccatcggcgcgaagcgttgcagcagacgcgctttctgcttatcgccatcatggagcatgcccacccacaggtagacgcgaatcgcgtcatagctgccgatcggcggcttttcggttttcagctgccagcctttccctttctcatagcgcacccagtccggggtaaagcctttcggcgcggtctccagcagcaggcgcaggttactgtcgcgcagagcgggccacggcgcgccaaaacgcacaaagtaggtggccagctgcggcggaagatagctggggttaaaccgccagcctctgtcatcggcaaaaccgacttttcccggcagcagcatcgtgccgaggcccggcaccgccaccgtctcttcagcgacaatccgcgccagcagggctttaccggtctcggtgtactgcggctgttgccacaggcgccccgcctccagcagcgcccaggctatccacagatccgagtcggacgccgagttgctgtccagcagggtccactgctcatcgtcctttttgccccacagccagcccggcaaatgttgtttcagatcgccttccgccaggttgttctgcgtccaggtcagcagtttgtcgaaccctgcgcgatcgttggccgccagggcgaaaaacaggccatagctctgcccttcggaggtggagattttgcgcgcatcgctggggtcaatcacccgtccctcggggctgacgtacgcttgtttaaactgctcccaggcgggccactggcaggcggcgcccacctggcccgccgccagcagcagcgccgagagcaccgcgccacaaagtactttcatcatggtttactcatcatccaggctaagacggcggcggctgatgatgcgcagcatgcgccacagcacccatgccagcagcacaatgctgatggcggcgaagatcgccagcagtatcgggtggttagagagcgcgaaccagatgcgctcgaaccagggcagatgacccacgtagtaaatatcccccacccgcagactgttgacgccggattcgcggatcaccgccaccgagccaaacatcgctgcccgcttaccgctgtcgttgagggcgttggtcagcagttcatttccgcgcgggctgtcggccagcagggccaccacgctgcgctgatcgttatacggcgactggaagccaatcaccgccgccatcggcccggaagaggtaatgtcggtgcgggtattgggcgtgcgggcctcatcgtcgggataaatgctcgccaggtcatagtggcgcatcggcattttcacccagcttttggtcgcctcgaccagcaggttgattttggtgtcgtccttgagcgacgacgggatcgcgccgatcagcagcagatccgcatctttgttcttgatctggttgccatcgtcggtcatttgcagattaatcgccgccagaccggtctgcgaaccgatgccccccagcgcctgcagcagcgtcgccacctggccctgggtcggcgccttcggcaccaccaccagcgtgtcggaaaggtccgccatacggctgtaagggaagcccgcattggcgaagacgcgcaggtccggcaaggcgataaagtgataatacttcgagaagtcgatggtcgaatcgtcgccgatcaccacgtggttctgcaccggctggaaggtaatacagttgtcgatggagccgccgggcatcgggttcatatactggaagtcaaagcgcagctggttgaccgccccaagacgcagcgcggggatggtgacctccgatttgccgtccagcagcccctgcagcaccggcaggcgcaggatcagtttgttcacgtcctgggagctgttaaggctgaacgactgcaggaactggtcgttgaggctgatatccatccgcgagctgtccttcaccggcggcatggtgtagcggtatttcagatccatatcgatgccgttggcccgcagcagatagagatccggcggcaggttaagcgccacggtgatggcatccggcaccaggccgctggactgcagctgttgctcataggttttcagctcagcaaaggtgaccgaacggtcggtgcgcacccagttcggcgcgtcgtaaggctgacgcggctgcagggttttgatgccgtccacggtgacgctgctgccgcggaacagaatattgccctgagcaatccccttcgccgccagcagcaggtcgttatcatcgcggccgaaaatcaccagcagcttgacgtagggatcgttcgggttgtcgatcatttcgatggtcggcgccttgaccggcggatgatcgcgcaggaagtccggacgcttgtcgttggtggcgaagacaatggcgttacgatccggcagttcattgaaatagaccgggaactgctggccgcgccagccggccttgctgccgaaccaggaggcgactatcgccgccgcctgctgctgggtgaccgctggcgagcccgggaaaatcatcggcagcttcagcgggcggttatcgcgcggatcgtagaacggcaccgggaagtgtgacagatcgttatttaccttcagcgactggtaggtgagatccagatagctttcgcgtccgacgtccagccacagcgtgctgctggccgggttttcgcagacgtcgcggtagtggccgacaaactccagccgtacgcggttgaagtcggtgatgtacagcgggtcaatcggcagctgcgcgcggatctttttccccagctgctctttggtgacgggcaggacgcccatcagctcatcgttaagatagaccttcaactgcgactgcacgggcagcagcgagggcgatggggtgtattccagattgagcagcgcgttggcgaccagctcatcgctgcgcatgccgaattcgaccgacgcgtcaggccgtgagccgcgcagcacgatgctgccgggcggcggcgcgatggtggcaaagctcagcttcacctcccgctgcggcacgttctcggccaccgccgccggagcggtcggttcggcgagggtcgccgtcggctcgcccaccacgatcggcgcagccggggtcgcggcctgcggctgaacgccaggggcagcgttcgccaccgcggccggcgccgcataagaggccagtggataccagctgcacatgcccaccgctactgcacacatccaggaaagttttcttttcatcgcattatcatcattgttgagccattgccgggtctgcggagagcgtcggcgcggcgcgttcagggcgtcggggtacaaacgacgctatccaggccaccagcgaagtgagcgcgcggaaaaccaccttcaccgacggcggcgaaaactccgccaggtgacgatagccacggaagcccagcttgaggatatccagcaggctttccatcggcttatcttccgggaagctatcctgccaaagcgcccacgtatcagcgcgggcaaacgtacactgcacaaaatcgatatgctgctggttggttaacggcagcagctggagccccacttcgctgccgttgacccgcgcgaccctgaccgggaaggcatactcctgctgtccccgtttgagcagcagcctggcgttctggccttccagcacctgcgcgtcgccgttaattttgatccccagtccgccgtcggaatagtcgtggacggtgcaggagaacaggtgaccatcttcgcgggcgatagccgccggcatgctcatttcgacacggtgcgaacggcgaacctgcttgctttcaaccgagaccgccaccgcgccgccaagaataatcaggttgtagaatacccagacaatactcacccagacggtgaggatttcattttccgggccgtacatgaagcgccagatccccaccgcgacgccgaccagattgagcagcaccaggtagatatagggtcgggagatcacccagtcgacatactcctcttccaccagcccgcccttcgcggtgacgttgaacttgcctttatgcgggttgatcagcgccacaaaagtgggcggcgcgatataccaggccagcaccgtctcgtaaatttcactccagaacgaatggcgatatttgccctgaatcttcgagttggtcaggctggcgtggatcatgtgcggcaacacgaatagcgcgatcatcagcgctggcgcataaatgatataggcatggagcagcaaaaaggccagcggcgccgtgaggaagatgaggcgcggaataccggagagaaagtgaagcatggcgttggcgtagcagacgcgctgcaccagcttcaggcctttgccaaacagcggattatcgaggcggaatatctgcaccatcccgcgcgcccagcggatgcgctggccgatatgcgcggataaactctccgtcgccagccccgccgcctgcggaatacgcatataggcggaggtatatccccgccggtgcagacgcagcgaggtgtgggcatcttcggtcaccgtttcgacggctatcccgccaatttcatccagcgggccgcggcggataacggcgcaggagccgcagaagaaggtggcgtcccacatgtcgttcccgtcctgcaccaggccgtagaataacgtcccttcgttcggcgttttgcgaaaacgaccaaggttgcgctcaaagggatcgggcgagaagaagtggtgcggggtctgcatcatcgccagctctttctctttcaggaaccagcccatggtcatctgcagaaacgagcgcgtcggcacatggtcgcagtcaaagatcgagacgaactcccctttggcatatttcagcgcattattgatgttgccggccttggcgtgttcgtggctggtgcgggcgatatagtgcaccccaacatctttggcaaactggcgaaacgcttcccgtccgccgtcgtcgaggatccagatgttcagcttgtccttcggccagtcgataccctgcgaggcgtaaatggtgtttttcaccacgttgagatcttcgttataggtggggacgaagatgtccacagttggccacaaatccatgtcctccggcagcggcaccggctggcgattcagcggccagaccacttggaagtagcccagcaccagcaccacccaggcgtaggtctctgcgaacagcagaatgatcccgcacaccagacttaccgggtcgttccagttcagcgtcgaggtatagcgccaccagatatagcggcacgacaccgtcagcgacagcacgatcagcatcagcgccgagaaacggcccgggatgcgtcgcaccagcagcgccacgccccacagcagcatcaggaagataaactgcgacagcgggttaaagggctgcgtaatacacatcagcgccagcaccagcgagcagaaggtcacccccccaaggatcgcccggcgcagtttaggattgaggtgcgccagctctttctgtttatccagatggccggtgcgggcgttcatctgctcaggcaatttttccagccactgcgtatagcgaccgtgcaccccttccagcgccgccagcgaacgccagttgacctttttctccggctccggcacgcgcgtcgtcagtaaccacagggattgcagcaggtagcgcagcggatccagcggacgcgggcgatgcggatttatgtggggaaaataggtttcatggcgggccagaatcgcctgccagcgcggcgtctccagcggcatcagcgcccagaccagcgacgcccacagacagccaagcgacgccgacagccacgaagcgccgtgctgccgatagtcatcatagcgcgcacgcagccgctcccccaccggcggggccagcagcagcgtactgaggcggatcatgccgctctcccggcggaatagtggatcaggcaccagttcgccagggtcagcacctcttccgccgccagcgaatcctgacgatactccccaagaggttgtttcgccgccaggcactcggccatcgcctcgtcgcggtgaatcgtcaccggcaggatgcgcggctggctctccagccacagctggtagagatcttcctgcagctggctgccgacccgcagatcgttaatcagaatatcgccgttggccgggaggggctgctggtgtagacggatatggctattggcgtcgggatgaaccaccaccagcgagcgatcgcaaagcgtcagcagctcgcgagtcaacggcgaataacccgccggcagatccagcagcagccagcggtactggccctgtagctgctgtactgcctccgctatcgcccccagggtgggctgcagctggtcgacattttctctttcgccggcgctgagctggccaaacggcagtagatcgatatgctgcgtatagcgcaagcccgcgtcacgccagtcccggccgtcgagcagcgcccgcgcccagccgtcctgatgatggatatcggtattaaagaaaaagcgcagcatattatccgggctggcgtcgatcgccagcacgctttcaccgagcaattgcagggcccaggcgagtgcagccgtaatggacgtgacgccagttcccccgcgcacgccctgtaatcccagaatagccatctccggcttccttattttttctctgcaaactctgccagcagcggccagcgcttcagcgccgcgttcagctgttcgcgcctggaaatatcatgataatcaatatccggcagggaaaatgcccggctaagcgccagaaaatcattttgaaaggtgtaccccagcgtggcgtccgtgggtaccgcaggatcttttgctggcatatctctgtccgttcgaaatttattattaaaccagaggacgtatacagctcatccttaaaagcaggtgtacatgctaaaactgatgacctttaatttcaatgttaggtttactctgtcggtttcgctagtaaacttattcagtgtcaatcagggcgcacgagggatgccgtggataatgtatttactttgggtatttcatcattatgggatgaagtgtgccatatgccggtcggcggagtatggtggctcaacgtcgaccgttatgccgatgccgtcagcctgtttaatcagacgctggccgcgcaggcgaaaaacagccacgttgccgcgctggttatgggaaacaaacccaaggatatcatttccttagatcatactcacggtccggataatatcgcgctgttcaccctgccgaatcgcccgcaggcgctggaggaaatacaccgcgatttagtctgctccctcgaacctggcaattatttgtttattctgctatgcgctgaaaatgcctggcaaaatataaataatgaaaagttatgcgcctgggtagaaaagaccagccgctgggcgcaatatcaccgttgcgcgttcttagcgatcaattccgcgcaggatatcgatcggcagctgactcccttattacgtgagtaccgctccctttccggactggcaagtattcgttaccagggcgaccggcatatctttgatattgcctggtggggaagcgataagggtatcagcgcccaacagcagctgatggtgcaacatgatgacgctggctggcgattagcgcaggacgctgaaaccagcgtgcagccgcgcagcgacgaaaaagcgatcctcagccatgtgcgcgtgctggaaggcgccccgccgctgtcggaatactggacgctgtttgacaccaacgacgaggtcttcaacgccgggcgcaccgcgcaagcggcgacgatcctcttctccattacccaaaatacgcaaattgaacagctgggccgctatattcataccctgcgtcgccagcgcggtacggcgctgaaaatcatcgtccgtgaacaaaccccgagcctgcgcgcgaccgatgagcggctactgctcagcagcggcgccagcctggtgatccccagcagcgcatcgctctcccgctgcctgacgctaatcgaaagcgtacagaaccaaaagttctcccgccatatcccggaagattttgccaccctgctgacctggagtcagccgttaaagctgcgcggctaccagaagtgggatgccttctgcgaagcggtacacaacgtgatgaccaataccctgcttccacccgacagcaaaggcgtgatggtggccctgcgcccggcgccggggctgcgcgttgagcaggcgctgacgttatgcaaacctaaccggatgggcgacatcatgaccatcggcaataaccggctggtgctgtttttgtcgttttgccggatcaatgacctcgataccgcgctaaaccacattttcccgctgccgaccggcgatattttttctaaccgtatggtgtggtttgaggacaagcaaatcctctcggaaatcgtaatcatgcgcggcgtcgagccggcgcgctggaacacgccgctgcctctctcggtcggtaaaaacgagaccattaacgccacccacgatggacgccactggcgacgctaccccgaaccacaccggttaaccacccgcgaggagcaagcctgatgatgtctctcgccgatattctgcaactggtggtgctctgcgccctgctgttttttccgctgggctacctgacgcgccactatcagcgccggatccgcacgacgttaagactgatgttctttaaaccccgttacgtgaaaccggcaggggtattacgccggggaacaacggttaagcaaggcaaagcgaacaaatgacaaataaaaaaacgaccgcggcaccgcttccgctctggcagtactggcgcggccttggcggctggaacttctactttctggtcaagtttgccctgctgtgggccgggtatctcaatttccatccgatgctgaacctggtatttctcgcctttctgctggtgccgatcccgcgcgaaaagctacaccgcatccgccactggatcgctattccgctgggattcgcgctgttctggcacgatacctggctgcccgggccagagtcgatttttagccaggggtcgcaaatcgccggcttcagcgccagctatatctgggatctgattgtccgctttatcaactggagcatggttggcgccttctttgttttgctggtgctatggttgtttatcagccagtggctgcgcgtcaccgtgtttgtctcggcaatggtcgtctggctggcggtcagcccgctgctgccggcctttaccctatggccctccggtcagcccaccacggccgccgccacgaccgcgcaggccaataccggggccaacgccgccgctggcgccgcgtccagccccgccaacagcgatattccgccgcagaccgagccgccgacctcagccaacctgaccaactggctgaacgctttctatgccgccgagcagaagcgcaagacgccgttcccggaccagctgccggcggatgcgcagccgtttgacctgctggtgatcaacatctgctccctctcctggtcggatattgaagccgccggtctgatggatcatccgctatggaagcactttgatattgtcttcaaaaactttaactccgcgacctcctacagcggcccggcggcggtgcgcctgctgcgcgccagctgcggccagctgtcgcatactaacctgtatcagccgtccggcgccgattgctacctgtttgaaaacctggcgaagctcggcttcaaccagcagctgatgctcggccataacggtctgttcggcgacttcctgaaagagctgcgttcgctgggcggtatgcagagtccgctgatggaccagaccggcctgccggtcagcctgcaggcgtttgacggctccccggtgtatgaggatctggcggtcctcaaccgctggctgaagaccgaagaggccagcagcaatccgcggaacgccaccttctataacaccctgccgctgcatgacggcaaccacttcccgggacaaagcaaaaccgcagactacaaagtgcgggcgcagaagctgtttgatgacctggataacttcttcaccgagctggagaaatcggggcggaaagtgatggtggtggtagtgccggaacacggcggcgcgctgaagggcgataagatgcaggtatctggcctgcgcgatattccaagcccgtcgatcactaacgtcccgacggcggtgaaattcttcggcatgaaggcgccgcatgaaggggcgccgattatcatcgatcagcccagcagttatctggcagtgtcggagctggtggtgcgcgccctcgacggcaaaatgttcagcgaggacagcgtcaactggcagcagtatgtcgccaacctgccgcagagcgcggcggtgtccgagaacgccaacgccatcgtcatccagtatcagggcaagccttatgtccagctgaatggcggtagctgggtgccttatccgcaataagcgacaaggccgcctatgttggcggccttacatcgtgagacgttcccattctaccttctcagcccgcaggcatacgggcggggaaggcggcaaatcaatcaccgtatttagcgctgatcctgtttcgccagccagaccaacagcttgaggctggcagagtaataatcatccttgtcgtcaatctgcggcgcctcctgcggttcacccagcgtcagatcgcgcaccgccagcaggccgccggccatataccagggagccacctcgttggtgctgacgttgatccacgccggggtttgcaggcgcgggtaactctgcatccaggccttccagggcgcgagcaaggcgctgtgcggatcggcccacgagagatacagcgggatacggatcgcatcgaaactcatccgcggcggccactctttggctggcagcatcttgccatccgcccgcagcgccacccagtcgctgggtagatgtgatttcccccagcccatctgccccagcagcgcctgtccgtcgctctgcaatgtccgccaggcggtgagatgcgtccgctccgcgaaggcgcgccaggccgggaagatgaaataggaagggttaaggttcaggtgatcattgaggttgaaccctttcacacccgggagcattacctggcgaccggcgaaagacaccaccgtagacttcagcagggcggcggtgatggcgtcagaggcaatcgcatagcgcttatcctgccactgcttttgcgcgcgtagcagcgcccaggcgatcagggtatcgccatcggaggcgttgtttttatcggcgatagggtccggcgccaccgggttatagcgccagtaaaacagcccgttagacttgttgcgcagggtgttgtccgtccactgccacagcttgtcgaacgccggacgatcgttattcgccaccgccaggagcatggcgaagccctgaccttccgtatgcgacacattgccattagctgtatcaatgatacgaccatccggcatcataaaacgggccttatagcgctcccaggccgtatccgcccacgccctgggcaccagcatcactaccgttgtcactatcatcgccactaaagcacgcaggggcataaattcactctttatggatggtagtagagaaactgaacgtcagagacggagaacacccgctcacgctgcagtatcacgtgggcactgcctccctgactctgcagccagcgagaatataacccctcgagtatggcacagaacgcgttgcaccagcgcacgcgccccgcttcgtcgcggctgaccggcaacgcctgatggcgcaggcgcaggccgtcctcaccgacatcgatggtcaccacgccccagtgaaaatgagtcagcagccggttgatattggcctccagatcccccaccgtctccgacgccggcagcggatgggtctccgccagcgaggcgcccatctgacgcaggaagggctggctttccagctcgccggcattatttagcataccttcgatcataataatcaacagatcgaaccatccggcaggcgtctgctgctgctgaaaccaggtcatcaccaccgggttattgttctccgtcatcatcaatgatctcctaacatatagcgaatatagagcccggcggtgctttcgttataatccccgaaggtgtcatagccaatctggccccccagggtcatttgtttgttgaccttgtaatccgccccggcgcgcagggtataccctatgccgctcttcgaggtcgcggagtagtaggcttccttggcaaacccattgctcaccgccgtctccagggtctgctgccactccgaattggtcgggaaataggcgctcttatcctgactgtaagactgatagcccaccgagccgccgagcttcatggtccagttatcatatttctccgttagactgaccggcagcgatacgctgacgtagttttgcggactaaagtagcccccctgaccataggtgaagtagctgaggtttttggaataatccatatagctcatgctcaacccggcctgcagctggcggtattcgtcatggtagggacgaagatagaccccggcattggcgttgatactggtgttgctggcgacgttctgccccagatagctgtatccaccgccgccgacatagaagcccgcgtcgccgtcgtcatagctcagctgcagggtgccgccgtttttcgtcacctgcccccaggttttcccggaataggcgtctttcagacccacgtaggaaagcaggctgtcggttagcgagcggcgttcgccggtgaggatcagcgacagatagttggtcagcttgggcgaccatttcaccccgccgactacggtattaagatcctggcccaacggcgtgctgccgatatcgacccggtaatcgtcaccgcttaacgccagcgccagttcgacgccattggccttctgcgaatcggtcgagccgctggtctggtcaacgttcggcttgcggctggacgaagagagatagctggccacctgccccgcatcatagctcccgagcttcgccaggttttccatcccgctgctggtggtcggattgaaatctgccgcgttcagggtgccgaggccgcttaacgcctcggcccctggattgctggcgaaataggccgtccgctccgcctcggtcatcgaggcgatcgccgcctgctcgctggtggcggtactcaccatgttggagaccgcgttagccagcgggttggcgccgtagcgacgccaggcgtcgccgctggcggtcccggcgttcaacgacaccggggtgacggtaaagtcaaagcgcgagtcgccaaacggcgaggatgaccaggtcagcggcgtccggagctccgtcagcttgctggtgcccgattcgccgtcgcgtccacgcacgtccattcccccctgcagccagctgccggttttctcctgcagcgactccatcatggtgtccacctgacgcagcatccgcgtctgggcggtgtccaccggcagatcggtgcgctggatccccggcagcgtggaaccgggcgcggcggctgactgggcaacctgccacggcatgtactgcccgtaggcggaggccgtccgcgtcggcgccgacgtttgcgacacgccgataaaggggttatccgccgccagcaccccgccgacggtcggcgtttcgctactgttggtgctttgcatgcccagcagtttgccgcgggcgctgcgcagataggtcatcgcctgctgatgatgtccctgggcctccgccactctcgccagcagcagcaggcgatccggggagttatcctggcgcaaaccgccggccagctgttcagcgcgatcgttgttccctgcggacagcgccacgtcgatggccccggcgcgcgcatcctggttcggcgtatcgcgcgtcatcaggtagtcatagaccaccccggcctctttgttcattttgccgctctggtacagccgcgccatggcgaacatcagatcggtattttgcggatcgctttgcatagcgcggatcagcttgtcatacgccgcagcgtaattgccctgctcacgcaggcggtcggcttcgttgatcacatagccattgcgaatgctcgccagctgcgtcggcgtactgctggcctgcagctgcggattgctgatcaggttctgcgcctcgccggtcagcccggcctgattcaggacagcgatctgatcggcgtaatccccggcattgccggatacgccgctgctgatattgttgcgcaccagcgagaccgcggtggtcaggtcgccgctctcggccagcagacgcgccagcttgccggcgtccgccggggcttttggcggcgtggaggccatcgcccgcagggtattgctggcggcgatggtattgccctgcgccaggtagttttcggccgtcaccaactgcaggttgtagttcacccgctggcgcaaatcgcgcatatcgctggtctggctgccgccgggaatgcgcgccagcagcgtctgcgcctgctgccaggcgccgttttcgctggcaaacagggcggcggcatacagcgcactgttgctggcgccggggcgataggccgccgacatcagcgaagaggcctcgctgccgttacccgatttttgcagcagccgggccaggtcgaggcgcagccagggatcgtccggatagcgggcgacgccttcgcgcagggtggcaatggcgccggctgggttaccgctgctgacctgcgcctgggcctgacggcgcagggcatcgcccggcataccggccaccacccgcggctgcagtttttgccgcaggctctgcgggagcgtctgcagcatcgcctgcgcctcggcggatttattctgctcgcgcagcacgtaatagaggttttcccgcgccgccgcgttctgcggatcgtcatttaacagtgagcgcagcgtttgctccgcctggggcaaatctttgttgtgccgcagcacatcggcgcggaacagcttcgccgaggcgccctgcgccccgctctgctgcgccaacggcgcggagagcgccagcgcctggctgatattgccctgcttataggcctgctgggcctgcgccagctggccgtagaacagcgcatcggccgcctgctgacgacgggtcgccgaggcgtcgccgccgaggtccgcggcccggctcagatactgcgacgcggcctggtagtcgccgctgcgctgggcgatatagcccatgcccgccagcgcatcggcatcctgggggttagtctgcaatacctcttcaaactgctgcttcgcggcggcggtattgccgctgttgagattggcgtagccctggccgcgcgcctgaccgctgcgccgttcgcgaaagtaattctgaacttcgctgtcctggggatgccgctgcatccaggtgtcgtaatactgctcatccccggcctgcgggcccagccagagcagcgcctggcgcaagccgctgtccgcctctttattgccgctggccatcggctcgagcagggcgatcccttcccggcgagtctcttcccgccaggttaacgctttgcccaacgccacccgcggggcgttctcctgcggatgctgcgccacgtactggcgcagctcgctgatagcctgcggatagagcgatttgtcgctggccatggtcaggtaatattccgccgccagctcggcaggcggcgtattgccattgaacatgctgcgccaggtcgccagcgccccggggatattgcctccgcgcgcctgctggcgggccaggctgagctggccctgaggcacctgcgacatctttttggcgttgtccagatcctgtagtcccgggctgtcaggggccgctttcgccagacgcgcgcgccactgcgccgccgcctgcatatcgccgccctgctgcgaccagagcgccatcagatacagcgcctgggtgttgttggcatccaccgagagcaccttctgcagggactccatcgccagctcgtcatgagatttctcatgccagtagttggcctgagcgaacagcgcctgtagcgccgcgtcgttccccgccgccagcgcgccgcccgaggcagcgagagtcaacgcgccggtgaggcagaacgtggtaagccgacgggaggtcttcatcgttattattatctttcttttcattggttatcccccgaacccagacgcttacgggcgtgacgtttaaacatcgcggtcagcgccagtcccattatcgaggtggcaatcagccccagcaccgccaggaaacctgagtgctggctggcataccagaccgccatcatgtaccacggcatctgaccgctggggaacggcgtactcacctggaagctgcgcaccccgttatcgctggtgatcaccgcggtatcgccgcggatcccggcgttaatgcgcggcgattccagatcggtcttcagtcgcgccagctggtcatcattgctggccagcgccaccaccaccaggcgggtggaattccacggcgagcgatagctgatgaacccgcgccaggcgctgctcgacgaaaagtagcgatcggcgtcgaggctggcggaagtccagtcgccggtgagccggcgctggactttttgccacaggtctggctcgcggacgctcagcacattatctaccgggcgatagggtgagtcggccagcaggctctggttaaaggcctgctgatcgagagcggtgaccgccagcacgtcacgttcacgcagcgactgcaaatcccccccgccggtgggcatcccgagcacgacgcggttattcgccagcgcggtgccggtcgcgttcccggagcgtgccgccagattcagcagggtcgccacctgggtttcagacgggtccgccggcagcaggagggtcgtctgcgaatagtccgccagccgcgagaaggggaacgaggcgccgacaaagtaggagagattgggcaacagcgagaagtgacgcgtcttgctcaaatcgatccaggagtcgtcagtgatccggctcttgatattgttattcagcagcaccgaacacggaacatcgtcctttggcaccacattgaagtacatcgacagctggttatcgccgtaaatcaggtaaggcgccagcgggatggtaaagcgctcctggcgcgcatcgcccccgaggtagcgccagactttctccagcggcccctgcttgttcatcggcaggttgttgaggaaggtgccattgagcgtgacgctcagcaaggacttgtcctcattaatccagctttccgacgggaagcggtagccaacctgtagcggaatggtctccccatcccacagatagagatcgggcgcggcgcggaaggcgatacgtaaaggttcgtgccagacgccgctgacggtcgggctttggtccttacgcagcagctcgctgagcttgaccggacgatcggtggggatccagcgcggggcatcatatgctttgccaaccgggatggtctgcggttcgacatccagcgtcgcggtttgcggcgcaaagttgccgcgggttaaccgccaggcggccatgcgcagcgccgtatcgtttttaccgacaatcagcagcagtttataggccggattggcggggttggcgatgatgcgcagcagcggcttatcggtttccggcagcatcatgccgcccacctgctcccccggatggccaatcacgatgccgtggcgttccggcagacggtcgcgcagagcgctgaaggcaatgccgcgatagtccgcctggatacccagccaggaggagatcagcgccgcggcgctgaagacgtccgccgacggcttggccccataggcgaccgcaatgtccgccggggtcatctgcatgctgtcaaagaagggccgcgggaagtggctcaggtcgtcgctgatgttcagctgctggctttcccagctgaaatgcgacgtgggcagcaccgtcacccgcgacgtatcatgaatgtcacgctggcactgcagggtatcgccatcgttgatcttcacgctcaggttattgctggagaccatcagcgcgggcggaatatccagctgataatgggagacatcctcgccatcggcgcccagcggcagcgtgccgagcggttgaccgttgagcatcagctgcagggtggcgttgcggctcgccatctccggcgatacgcgaacggcaaggctgagctgcgaatggatcaccacctgatcggcaggcagggtaaagctgaccccaccctgtcgctggccgccgctgaggataatcccgtccggcatccccatctgcgccagattcagatcgcctccccagaccggagcgacaggaatgacctccggcgcggccgtgccgctcaccggcgggggtaagtccggcataaccggcgcaggggccgtcgccgccgcatcgccggcggtggcgggggctgccggagaggcgccctcctccggcgaggcagccggaggttcgtcgccgggctcgctgtccgccgcgtcgttgagctgcgggaagctcagcggggcagcggcgccggagcccggttcttcactgtgtagcgcaggcgcagagagcatccctgccagcagcgccagcgtggttaatcgcttcataacgtcccatcctcctgcgccgttttcgccactgttgcccgattgcgctggctgcgacgggttttccacgtcagccagaacagttcgaacacgcagcgtaaaatggtgaagaaggagcggaacgggttatcctgcgggcgcggcggattaatccacgcatccgcgcgggccagcaccacgcgcaccagttcacggcggcgcgaaagcggaatatcttcatcaaacttgaggcgcaggaagcgctcgtcagaggtgaccagctgggccgggatcgagatagccccggactgcaggatcagctcaatctcttcgatgtcatcctccagatggcgattatcaggcgcgaccacgcggcagccgcccatcgacaggtccgcggtatggctgcgcgagacgatgccgctggcgtaatggatcaccaccggaatatcgacatcgatacgaatggtttttcgcacctgccgcgtttcgcgcgccacggcaatcgccgccagcaggaagatcagactgtagatcccccacccgacgttgagggcgataacgttgggatccgagccaaaatagtcatggccaatcgcccggacgatgccgacgatcacccccagggccagcaggcaggccaccaccaggtgcgggcgcaccacggtgaaatcgaagtagccgacgtccagcagcccccccttatcggtaacgttaaacttgccgcgtttggggaaaatcatcgtcaccagggtcggcagcaccaggtggaaggccagcacaatatcgtagatctccccccagaagctgtagcgatagcggccgttcattcgcgaaccaacgtaaatagcgaggaacaggtgcggcagggcataggagacaatcaggctcgccgacgagtaaataatattgaggttaaacagcaggtaagccagcggggcagtgacaaacaccaccctgggcagcgcgaactggtagtagagcatggcgctgagatagcacaagcgctgctgaaaagtaagcccgcggccaaacagcggattatcgacgcggaaaatctgcgtcatcccgcgcgcccagcgggtacgctggatgacgtgcaccaccaggcgttcagtagcgaggcctgcggccagtgggatatcgagaaaggccgacttccaccccagacgctgaaacttcagcgccgtatgagcatcttcggtcaccgtttcgacggcgaaaccgccgatctgcgccagcgcctcgcgacggatcaccgcgcaggagccgcagaaaaaggtggcgttccagttgtcgttcccctgctgaatcgggccatagaacaacatcccttcgttgggaatgttgcgtccgacggagaggttacgttcaaacgggtccggggaatagaagtagtgcggcgtctgcaccagagccagcatcgggtctttcaggaaaccgccgacggtggcctgcaggaagacgcgcgtggcgacgtggtcgcagtcgaaaacgcagataagctccccctgagtcagggtcagcgcatggttaaggttccccgctttggcgtgcttgttgtcattgcgggtgatatagcccaccccaacgtcggcggcgaagacggcaaactcgctgcgcttaccgtcatccagaagatagattttcattttatcttttggataatcaatgcattgtgccgccaggacggtatcgcgcaccacctccagcggttcgttatagctcggaatatagatatcgaccgtcggccacttactcatatcatccggcagcggaacaatgccgcgcttcagcggccagaccgtctgcagatagttaagcagtagcatcacccagatatagacttccgccagaaagagtcccatgccgagaatagcttcaatggacgagttgaagtgcagggtctgcgtgaggcgaaaatacatgtaacgggtggacatcagcagcgacgtgacgaccataatgaccgatacgctgcggcgcttgctgaagcccatcagaaagagaataccgatacttaacagaccaaaaatatactgcttttggctgtccatcggcgtgatcaccaccagcacggcgacgggtgacagcaccagcgccagcaaccaaaaaagagattttttcattcagcagccctgcaaaaagttaacgccctgacatgcgtggctggctgtgcaccgtgccatcgccaatatgaatacccaacagcgaagatatttttttagccatgatttcaatatcgaaggccgctgccgaggaagcgttaaagtccaggatcgacttctgcgaggcattggcctccaccacgctttcatcacgatggatcacgccaagcagtcgctcgcccagtttctcttccatcaggctggtgacgtcccggctgacctggcgacggctatcgctttggttaatgacgaaatagtgcccgtgcttataattcagcgccgcgccggtcaggcgctgcttttctacgtgcgccagggtcgacatcgaggcggtatccgccagcagcgggataagatgcaggtccgccagccccgtcagcgcctttagcgcgggcgaaggtccagggggcatatcggcgatggtgataagcccgggataattaagcagcgcggacagaccgcgctggaggaaatggtcattatgggtcagttgctcatcaaacgcctgacgctgcgcctcgctcacttcgccatatggcaggacgaaaatattactgccggcgctcaacacgcactggctccagtcgtgcagctccagcgccttcgccacatagccccgctcatcgttcagcggtacgccaaaatgcaaacgcagcgcgttctggacatcaaaatccagcgccagaactttgctgcccgtccgcgccagcgaataggctaaattggccgccagggtcgttttccctacgccgcctttcggtgaacagacgcaaatcaacggcatgtcgcgatcctttccagaagtgatttcaaaggctggtctttatttttcgccaccggctccgcgcttttcgcggcgaacaggtgggcatagttctcggcggcggccgcgggtcggggggccattctcggcggcggcgccatggccggttccgacgccggaattgaaggcgcaggggtcggcgcaggctcctgcctgaccggctccggtgcggctgcggcggtctccacgaccggctgggaagtagcaggcgcggccgaagcggcagacacaacaggatcagaggttggcgccgctgctacggccgcctctacctggcggaacagatccgcgggcaccgactgcggcaacggcgcggagaccgagcctcccagcgccagagaagagggtttctcggcgccgggatttagctgattgaggatcgcccagtcgccgtgttcccgcgtggcggcagaaagatcctgaaagttgaggttttgcgtccgcgttttttcttgaaagcgctgcagatcatcataatggttcattgataacctcatgattttaaaaatttcatattaagtttgttgttattttctgggtatattaaaaatatcgtgacgcttctgggatggcagataacgcgccgatggtgacgtaccaatacacacgattgacagggttataatagtttagaatttgattttcgggatgattccacggcagaagtatcgctacactaacatttcccttgcagaagggtagccccattttttaggtatgcgtacatccttaacttcccgcaatcaccacgcttcccagtcgtttttatataaaagtattaggtcatgatgaaatcatagcgtcagatcagcgaaagaataaacctgaaccattttaatttctctttaattctataaaaatggactgaaaggcttattttttcggataatctacgaagaatgctctgagagcgtgacataaactgcggcaatatgcgtaagcgccaggttttatccacggcgggagagaagctcccggccatgggaccgggagcgcgccatcaggcgtgggacttttgcggattctcatcctggtcgacggcaaagcaggccaccagctggccgccgtaatccttcagctgcggctggagctgagtgcaggggccaaagcgacggcgacagcgcgcgttaaaggcgcagcccggtggcggatttagcgggctcggcagttcgccggtcagcttgatccgctcgcgccggtcgtctgggttcagacgcggcgtcgccgacagcagcgcctgggtgtacggatgacgcggattgttgaagatctggtctttggtgcccttctccacgcagcggccgagatacatcaccatcacttcatcggcgatgtgctcgacgaccgacaggtcgtgggagataaacacgtaggacagccctaaatcctgctgcagatccatcatcaggttcagcacctgagcgcgtaccgaaacgtccagcgcggagaccggctcatcggcaatcaccacatctggatccagcatcagcccgcgagcaatagcgatacgctgacgctgaccgccggagaacatatgcgggtagcgatcgtaatgctcggttttcaggcccactttcgccatcatcgccagcgctttttcacgccgctgctctttgctcaggctgctgttaatcagcagcggctcctccagaatctgccccacttttttacgcgggttcagcgaaccatacgggttctggaacacaatctggattttttgccgccgcagcttctgcgcctgcgggtcgtgcttaagcagatcctgcccctgataatagagctcgccgccggtggggatctcaatcatcgtcagcagacgaccgagggtcgatttgccgcagcccgactcccccactaccgccagcgttttaccgcgctcaagggtaaaggagacgccgtccagcgccttcaccagccgttccggggcgaataaccccttcttcaccggatagtgttttttcagatcaatggcctgcaacagcggttgtggcgtggcggccttttgcgtactcataatccaggcctcccggcatcatcgagtgggtagtgacatttagactggcggccgccggtcagatccgcgagcgccggctcttcgctacggcatttatccgtggcataggggcagcgcggattaagcaggcagccgttgggacggtcatatttccccggcaccacgcccggcagcgaggccagacgcgctttatcctgggcgaattccggcagcgcgcgcagcagcgcctgggtataaggatggcgcggcgcgcggaagatatctttcgcgtcaccggtctccaccacctgacccgcgtacatcacgataattttatgcgcggcttccgccaccagcgccaggtcatgggtaatcaacaccagcgccatattctcttgctgctgcaactccagcagcagttcgataatctgcgcctgaatggtcacatccagcgcggtagtcggttcatcggcaatcagcagttttggccggcaggcgatcgccatcgcgatcatcacgcgctggctcatcccgccggaaagctggtgcggataaacgtccagccgcgacgccgggtcaggaatacccaccaggttcagcaggtcgatcgcccgctggcggcgggtttgcttattgccgccctgatggaccttaatcgcttccataatctggtagccgacggtaaagcacgggttgaggctggtcattggatcctggaagatcatcgccacttccgcccccaccagctggcgccgctctttttcagagatgcgctgcagatcgcggccgttaaattccagtttgtccgccatcacccggccggggtaatcaatcagccccataatcgccagcgagctcaccgacttaccggaacccgattcccccacgatgccgaccacttcgccctgcttcacgctatagctgatgcggtctacggcgcggaacggcgcattctcatcgccgaaatgcaccgataacttatctacatttaataacgccatctcgaacctcttactgcttcagtttgggatcgagcgcgtcacgcagaccgtcacccatcaggttaaatgccagcaccgtcagcaggatcgccacacccgggaaggtcactacccaccaggcgctttgcgcgaactgcaatacgtcggaaagcatggtgccccactcaggcgtcggcggctgcgcgcccataccgaggaaccccagcgctgccatgtcgagaatggcgttagagaagcccagcgacgcctgaacaatcagcggcgcaagacagttagggagaatattaacgaacatctggcgcatcgcgccggcgcccgctacgcgggaggcggtcacgtagtcacggttgacctccaccagcaccgcggcgcgcgtgagacgcacatagtgcgggagcgccacgaaggttagcgccagcgaggcgttgacgatggagggcccgaagattgccaccagcaccagcgccagcagcagactcggcagcgccagcataatatcgacgacgcgcatgatgattgagtccaccactccgccgaaatagcccgccaccaggccgagcaccacgccgaggatcagcgacagaaccaccaccaggcagcccaccagcagcgacaggcgggcgccgtacatcaggcgcgacagaatatcgcggcccacgtcgtcggtgccgagcagatgcgccatgctgccgccgtcctgccagaacggcggcgccagcagcgaatcacggaactgatccgccgggttatagggggcgaggaagttggcgaataccgcgatgacgatcatcaccaccacgtataccagcccgacgaccgcccctttgttgcgtttgaaatagtgccagaactcctgcagcggagtcatgggtaccggcgcagcgataactttattttcagtaacttgtgacatgatggccccttacttcttatgccggatacgcgggttcaccacgccgtacagcaggtcgaccagcaggttgacgaggataatcatcgtcgccaccagcagcaccccgccctgcaccaccggataatcgcgacgctgcagcgcgtcgatcagccagcgacctaaaccaggccatgagaaaatggtttccgtcaggatggcgcctgccagcagggtgcccacctgcagaccaatcaccgtgaccaccggcagcatcgcgttacgcagcgcgtggatcacgatcacccgcatccgggtcaggcctttggcgcgcgcggtacggatatagtcttcgccaagcacttccagcatcgacgaacgggtcatacgcacgatcaccgccagcgggatggtgcccagcacgatagcgggcaggatcatatgcattaaggcgtcaataaagtcgccctgctcgccccagatggcggtgtcgatcagcataaagccggtcagcggcagggtatcgtcaaggaacaccgtatcgctgatgcgcccggagaccggcgtcaggttcagctgtaccgaaaccagcataatcagcatcatgccccaccagaagataggcattgagtagccggtcagcgccaggcccaccgcggtgtggtcaaagatggagccgcgttttaccgcagccagcacgcccaccggaatgccgacggcgacggcgaagatcatcgcgcagacgcccagctcaagagtggctttaaagcgcgggacaaactcctgccacacgggaatgcggcttttcagcgagatgcctaaatcgccgtgcagcacgccccagatatagtgggcatattgctgccacagcggcttatcaaggcccatttcggccagcagctgcgcgtgacgttcgggggaaataccacgttcgcccgccataatcatcaccggatcgccggggatcatatggacgaaagcaaaggtgagaagggtgataccgataaatgtcgggatgactagtcccagacgtcggagaataaactgcaacataacccggattctctctagtgacgccccgcctggcgacagggcgtctgtattgctcacaaaagcattccccggaatagcgggaatacgccccccgcctctcccacgcggggagagggggtcaggcatcgtgcttattattcgacagagacgttatcgaagtggtgtttgcccagcgggtccaccacatagcctttgacttctttacgcaccggctcatagacggtggagtgagcaatgatcagcgccggagcctggtcatgcatcactacctgagcctgtttgtacagttcaatacgcttgttgtggtcgtcggtagcgcgggccggctgaataagatcttcaaacggcttatagcaccagcgcgagtagttggagccgtctttcgccgcggcgcagctgaacagggtcgcgaagaagttatccggatccccgttgtcgccggtccagcccatcatcacgctctggtgctcgcccgctttcgcccgcttcagatactcgccccactcgtaggtgacgatcttggcctggacgccaatcttggcccagtcagcctgaatcatctccgccatgcggcgggcgttcgggttgtacggacgctgtaccggcatcgcccacagatcgatggtgaagcctttttccaggcccgcttctttcagcagctgcttcgccttctccggatcgtaggtgtagtccttaacgtcgtcgttatagccccacatggtcggcgggatcaggttcttcgccgcctggcctgcgccctggtaaaccgctttgatgatcgcttctttgttgaccgcgtaggtcagcgcctgacgtactttgacgtcgtccagcggtttcttctcggtgttaaaggagagataaccaacgttcagacccggctgttccagcagggtaatgttcttatcttccttcatgcgcgcgatgtccgccgggttcgggtacggcatcacctggcactcatttttctgcagcttggcatagcgcacggaagcgtccggggtgatggagaagaccagacgatcgatctgcggcttggtgccccagtagcccgggaaggctttatacagaatgcgcgagtctttttggtactgcagcagctggaatgggccggtaccgataggattgagatccactttttccggcgtgccggctttcagcatgttgtcagcatactctttcgaaagaatggaggcgaagtccatggccagatcagcgaggaacggcgcttccggacgggtcaggacgaactggacggtattatcgtccactttcttcacttcgctaatcaggtccggtaagcccatcccttcaaagtattcatagctgccgccagaaactttatggtacgggttattagtattcttctggcgatcgaaggagaacaccacgtcatcggcgttcaggtcacgggttggtttaaagtctttattatcctgccacttcacaccctgacggaggtggaaagtataggttttgccatccgcactgacttcccatttctcagcaagtcctggaataacttccgtcgtaccggttttaaattcgaccaggcggttatagatcggtacggagctggcatcataggtggtgccagaggtgaagagctgtgggttaaatccttccggcgagccttcagaacaataaaccagggttttcgcttgcacgctggcggcgacggtcatggcgaccaggctcagaccaagcttcagcatccctgatttcttcaaggaaatactcattattctgctccaaaattgtgatgttgtttgcatatatccgccggacctttatttattttttacccggtccggtcggtggtgcccgaaggcgtagagagagatggggattcctttcgcaaaaacgactgagttgcagtacggattctccatgaaatgcccctcatgccctacaatctgtcaacagaatggggaaacgtcaatacagccagccgggttttacatccagcgtgagaaacggcaggcaaagattaaaaaaacttcaggacgctattttcagcagagaaatttatgctactggcaattcagcagaataaagaccttattaatttgcaacacccagtgggaaacaatgccagcaaatgagaaaaatttcttgctgtgtgaccaatatgtgagcgattaatagcgtgaacgttaaaacgcacagcggaaaatgctgcattcagccataagcttcgcgaaaaaagatctgttcatcgataaaaaaatgcaatggaagatgtcacaaaatagcgaatagccggctgaaaacgtgagtaaagacgtttattgtgattttggtggtatttttggccagttgtgcattgatgatgcccggcggcgctgctggactgaccccataaagttggatggttcatattaagcggctctcagagcctgggttcggtactctaccggactcaggccttttaatttcaggcttatccgctcgttgttgtagtaatggatatagtcctctacggcttttcttagcgcactgacactcctgaactccctcagataaaaacactccgatttcagggtcccgaagaagttttccatcactgcattatccaggcagtttcctttacgcgacatactctgcgtcatcccatgcgcctttaaacgttcctgatagctcctcatcctgtaatgccagccctgatccgagtgcagcagcggagcatctcccggtctgagcttcgggaacgcaccgtccagcatcgtattcaccatctccatcaccggcctttccgacaggctgtaggcgataacctcccggttaaacagatcgagaactgacgacaggtaaagcttttttccctgtaccgggaactctgtcacatctgttacccatttttcgttggcttttgacgcaccgaagttccggctcaggatattgggcgcggcctcgcccgttctccctttccaggcacgatattttttcgcccttatcacagaccggagtgacagttctgccatcagccgctgcactgttttatggtttatccgcagcccctgttttcttagtgcgagcgtgatcctgcggtagccataacgacctttgtgatagtggtatatcttcctgatgttctctttaagacccgcatacctgtccccttgcttcagtgcattcatattgtaataccacgtgctacgggacataccggccgcccgcagaaggtcccgcagagcgtgttcatgccttagttcactgattatcagggctttttgccatttttttcgctctgaaccaaggctttcaacttttttagataggcattctctgcccgcagataacgcagttcggccctgagttcttcgggggagagtttttccagctctttatctgtcagtggtgggatattttttggctttgtcatttgtccgggccgtccgcattgcatgtttaaaagaccttccgctccggcatcgttgtacacgtcgagccagcgccggacaagtatttctgcggagagattaaaccgggcagccgcttcacgcatcgtcaggcggtcactgataaccgcccggacgaccacgagtttaaattcatcggaataatgattattttttgcagtcaggccttctgcaccgtggaactgccatgccctgacccagcgacggacagatgttctttcaataccaaaaaggtcggctgtactctgttctccgtctttaccggacaaataatgattaaccacagccagttttgtttcaggggaatactttggtttagccataaaattgcaccttactcagttgggtgtccaacttttggggtgcagtccatgcgcttgcgcgggcctacgaaacgcgagtcgaacctcctgcccccggaggttctcatcctcactggcctcagatgcaaaaaagcctgctcattgagcaggcttttcgaatttggtcggtgatagaggatgactcaccacttcgtggctcgccctgcgggccgttgctgacgcaacgttctctcgcttcgctcgagtcgaacctcctgcccccggaggttctcatcctcactgacctcagatgcaaaaaagcctgctcattgagcaggcttttcgaatttggtcggtgatagaggattcgaacctccgaccccttcgtcccgaacgaagtgcgctaccaggctgcgccaatcaccgaatgcggggcgcatcttactgctgggatgcctacccgtcaatgccttattttcaaaaaatcgctcaaccggcgagaaactcagcagcctgagcagcgaatcgccggttgctcaacgtttttagcggcagttgacctcaaacgttttgcgatactcggataccttacatgtcaccggctcgccgagataggttgcgcccgccggggtgaatgtaaactctcccagtagcatcgtcagctcccccagctccgggcaggattgctgatgacgcataatatccgggcgggtatcgttattcaccgcccgggcgatgtcgctgtatgccagcttgtcagcaaaggcattagcacaaaactgcagttcgctttgcgccatatgcgcggcctgccccttcagctcggcatgctgtgccagcagcagctggcgaacctcgccggcccggctgtagccaatcgccgtatagccggccttattgctgaggttgacgctggcgccagccgcaagcagcgcctcgacattggctttattattcattttgaccgccagcatcagcgggctgagatcgttggcggaaagctggtccacctttgcgccgcgctgcgccagcgccgcgatcaccgcaggcgccccctgacccgccgccacctgcagcgccgtgagtccttcacggttcggcttatccacttccaccccggaggccgacagcgccagcaccagatctggatcatcccccgccgccgccagcatcagcggtgtggtgccggatttatccgccaggctggtgtccgccccggcgttggccaacgtcgtgatggtttccgccgatcgcgcgtgatcgacagcgaggaaaaaggccgattccccggacacgttgacggccttcacgtccgcgccgtgcttgaggagcagcgccactatctcgtcgacgttcttcttaaacgcgccgggcgccagttgtaacgccatgtcttcggtcatcagcgcgcgattgcccgtcgccagcgatttcgccgccgttgcgccaactatcttgtccagcgtactctcctcttcgacaggcgcatcgggctttttcatcgccagaatatgctgatagtcgtttctgacgtccccgccgtcggagatggcggacatcaatgccgtactcttgtcgatggaggtctgattcaccgacgctcccgcctggagaagatcgccgataatcgcggtatcgctgccacgcgccgccgccagcattagcgccgtgacgccctggcgcgtctggaggttcggcttcgcccgacgcttaagcagcaattccaccacatcgcgacgattttccgcagcagcgaccatcaggccgcttaagccggttttatcctgaccatccacatcaatgccgttatccagcatggctgcgatcgtcgctggcgcatcgtatttacaggccagcaggaactggctggtctcttcctcagactggcagcccgcgagcatcatcaggcacagtaggaccaacccctttatcaccttcatcctttctctccatgaaaagttcatgcacaggggaagcgaggaaacaggggtaatcaaagaagaagaggtcacctgccagacacgtccactgtgcgaaaaaaatccctcgcgcggcgtcggccggcgagggattagcttatcctgggctcaggaaaggaaaacagacccgagaatctgaaaactatcgggccttactttttccaccggcaccagttgttgttctcattgatcccgccatccggcgaggtatagccgaggcagcccataatggtgtcgtacagctcgacgtgacggcgcggcaccttcatcgcagcctgctgctgcagatgggcaaacgcggcggcgtgatcgggattttccaggtacttatccgacatccacaccatcatcggcacgcggaactgctccggcggcgccatcttgcgcggcgtaccgtgcaggtgttcacgctcgttaatcgactccccgtggtcggcggcatagaacacaatcgctttcttatcccgcagctggtcgaggacgctgacgataaagtgatcgacataggtcacgctattgtcgtaggaattgatcagttccgctttcgagcacttgttgtcgacgccgacgcactccggtttccactgggcgaagctgcgcgggtagcgttgggtgtagttaaagtgggagcctttggtgtggagaatgatcagatgcttaccggaggcgttgccctgcgccataccgcgcttcatctcatccaccagcagcatatcgtcaacgctcttaccgcggttgcgcggctcggcgccaatctgctcgcggtaggcgatattgttggccatcgtgttgctgtagaaccacatctcgctctgcatggcgtacagattgccgctgaagcccagctgatgcagcacggcaaagacattctgctctttgagcgtccgctgtgggttatcttccgccccgccctcgcgcacaaacatgcagcgtaacgacagtttggtagcggtatcgcacgagtaaccgcggaaggcgacgagattcttctctttctccagctctggcgtggtattgcggctatagccgaggatgcccatatggtcccagcgggtcgtttcgccaatgataaacaccacgtaggtatcatccagaccttccggcgcgacgtaggtgaacttcttcgccgggttaatcagcgatttgttgtctgaggattcatccacctgcgcccaggcgtacagtcccagcgccgacaaccagttcgacggcaggtaagagttggcgatcaccccgccatagctcggcatatccacttccgaatggcgctccacatcatgctggcgcagctctagcaggcggatgggtccccagacaatcagtccggccagcaccacgatcagcacgtttttaacccgctggcccggggtgcgcagctggcgcagcagcgtatggcggcagcggttgctccagatgaacagcaacggcggcgcgctcaccgccaccagccagaggatcaggtgccagccgatgacctctttcgacaggtcgatatcggtggtcatcaccgaagcgataatcccgtagccaatcaccacattgaggaacgtcatgtagtaactcgccgcggcggaaaacaggacaatcagcgtcgccagaatgcgccagatacggcggccgaacagcgacagaagacgtaacaggaagaaggtgacaaataccgtggcaaccagttcaacaacaccggaaagccctttccagaaagtgaactcttgagcataaccatcgaaacgccggaaaaaaacggcgacgttcataaaccagccgatgtacagcgccagccaaaaactaagcttctgctgcgtcatcgttctaatatatttcatgcaagcaaacctggaaaaagaagaataaaacaccgcctgacgctgtggcacgagtcagtaggctaatagggtgcgttagggttggttatcagaaacctctacaaaccgcgataagtagaccacagggaacgagaaaagtatcaggagggaatgtgatccagccaaacatttacaaaacatttggctggattggcactatttgcttagggaaataaccaggggcacgtttcacgccgcaggtttcaggcgtgcgcctcgttatataccgtgcttttcggctgacgaatggtggtggataacgccagcgagaggatcagcagggcgaagatcacgcagaaggtcacgtagaaaccgccgaacagcgaagcgatgagagagccgcagatgctgccgataccgaagcccagataaatcacgccatagtttttcgccagattgttcagaccaaagaactcactcaccagcgacgggaagacggtaatggtgccgccgaagttaaaggcgacgcaggcgatggcggcgaagaaggtcaaggcattcagcggggcgaacagcagcgcggccatccccaccagcgacacgacctgaccgatggtaatcacgcgaatgcgggagattttatcagacaggatacctaacaccaggcgaccgctgaggttcgcaatcgagataaccgttaccgcgttggccgccgtggcgacatccaggtggaccattccctgggcaatatctttcgctacgccaattacgtacagaccgctcatgcaggccgtcaggaacatcaccgccagcatccagtactgcggtttacgcatcgattcggcgagggtgaagtcgttttccacgacgccgttggccgcggtggctgccgggtgatttggcgcatctttcatcagggtcgcgccaaagacgatcatcaccagcacgatagcgccccagataacgaaggttttttccaggccaacggtggccagcaggtgggaatcaatgaatttgaaccccaggctgccgagaccataggagccaatggagaaggcggagatcaaccctttacgctccgggaaccatttcacgcagttcgacagggtcagcaggtaaccggcgccgtccgccagccccaccagcacgcccgcgctcagccacagcatcatcaggctgctggagtgcgcggtcaggaagaagcccaggccgagcaggatcccggaggccatggtgacgcgcttcacgccaaagcgctcctgcagcttgccggcgaccgacgaagagagcgccagcccgaggctcagcagaccaaaggaaaaagccacctgactgaccggctcgcccagtttgtcagacagcgaactgttaaacaggctccaggtataaaccgaaccgagagcgaattgggtgatgatggtgccgatcagtgtcagccagcgggtcgattgacggtttgcagcgttcatagcagttgtcctgataaattaactgccgccacaatagcgaaggcccctcatccagtgggggaaaaaggcatgaactgccatcagcggggaatgaaatgcattaatgttggaatgaatggcattgcataacattcactccgtaaattacaggcaaaaagttagtgtgcgctatctcacagaaatgcgccattgctgagatttaacaataaccacatcgtttcaaatgcgtaacaattcccgattaaaaattggcgctgacccccatcaaatagagcgtattttcccctgacggcaggttatccgcctgcgacagcgttgcccatgccgccacgtgggatcccaaccgcatatcagcgcccagggtgacatcgctccagcctccctccctggcacgggtcatcggcgcccagacatcgctggcgagcgactggttatagctcacctgcgcccagggatgcacgccccacagcgcctgataatccatgcgccagccgagcgtgttaacgtagcccacctcgcctgcgcttctcaccgtcggcgcggtgacgtcgctgcgcaggctggccaccggcccggaggttacgccgtttgctagcgggtaattccagccaacgctcaggccacggccgctgtccggcggcgccagcccctggtttaacgccagcccgccgggcgtctcagaggacttcatccgctcggcgagaatatcttcataacgtggttggtgatcgctatcccatgtatagcgttccgacgtattactttttgtatcgatagcgatatattcctgttgccaggcattcgctccagagacacatgacacccagacggatacgctcgccgggatcaagaacccccggaggccattgcatttctttattatcattaatgcgactccagaaaagagccgaatcggcaatattgctgtgtttttagtggggatacgatttccctgtattaactattatctttatctttcagccgtcaaggcgggcgtccacttttttagcgcagagggagaaacagctatgcagcgttgcggatgggtgagtcaggatccgttatacatcgagtatcacgataccgaatggggtgtggcgcaaaaagagggtcgccagctgtttgaaatgatctgccttgagggccagcaggccggtttatcgtggatcacggtgttaaaaaaacggcagaactaccgccaggcttttcaccagttcgatccggtgcgcgtggcggcgatgggtgatgacgatatcgagcgactcctgcaggataccggcatcattcgccatcggggaaaaatccaggccattatcggcaacgcccgcgcctatctggcgatggaagaaaatggcgagtcgttcactgattttgtctggtccttcgtcgacaatgcgccacaggtgacccgcgctgcgacgctggcggaaattcccaccacgacgccggcctccgatgcgctgtcgaaggcattgaaaaaacgcggctttaagtttgtcggctcgacaatctgttattcctttatgcaggcctgtgggctggtcaacgaccatgtcaccggctgcttctgtcaccctggaggtcaggatgatccgcaagtgggacactaaagataccgcgccgctgctggcgctgtggctggacagcacgattcatgcccatccttttatcagcgaaagctactggcgcgacagcgtcgcggtagtacgggatgtctatcttcccgccgccagcacctgggtctgggagcaggatggcgagttaaaaggctttgtcagcgtgctggactcccgtttcgtcggcgcgctgtttgtcgcgccgggcgccacccgccagggcattggccgggcgctgctggatgaagtcaaacagcactacgcctggctgagccttgaggtttatcagaagaacgaatcggcggtcagtttctaccatgcgcagggcttccggattgaagactgcgcatggcaggacgatactcagcacccgacgtggattatgcgttggccggcggatcaaatgccgtaagcggcagcgccgggccggtatatttctccagccacgccagggcggtgttcccggcacagccgttgcccagccgggatgtcggaatatctttggttaagacgttcaccgccccgtttttgcagatgccgacctgcggatccaggtcgggccacgctccttcatgcaggcaaatcacccccgggcggatcccctccgtcaccacggcgccggccagcacctgaccgcgggcgttccatacccgcaccagatcgccatcgacaatcccgcgcgcctgcgcatcctgcggatgaatagtcaccggttcgcgcccggcgacggcatagcgctcgcgcagcgcggtgtggttcagttgactgtgcagacggtgggccggatgggccgacagcagctgcagctgccccgcctctgcgttgccatgccactcgtcgggctccagccacatcggatgcggcggacagtcggcgtaaccaaaagcggcgatggtcggcgagtggatctctattttaccgctcgccgttttcagcgggttggcctggggatcggcgcggaaggcggcgaaacgcgcaaaacgggcattctccggctcctccggcatctcaatcagctggttagcctgccagaattcggcaaatggcggcagcgtcacctgctgctgggcgccgcgccgggcggccatctgatagaaagtctccagccactgcaaatcactcttcccttcggtgaagcgttcgcggccacccgcctcccagcgttcgctgaggtcggcaaagaccgcgaaatcgtcgcgcgcttcatctcgcggggcaaccacctgcttcatcggcaccagatgctggttactgtagtccccggtcatggtcagatcgttgcgctcaaacgaggtggtcgccggcaggacgatatcggcatggcgcgcggcggcggtccagaagcattcggaaatgacgataagctccggtttctgccacgcctgaatcagtcggttggtgtcctgatgatgagtaaagttggcgccgccggcccaccagataaagcgaatatcgggaaagcgccgcgccatgccgttgtgctgatactccgcccccggattctccagcgcctcgacaattcgtgcgaccgggatcttctccaccgcgtccacgcctccggccacgctcccctgcatcgagcccagcaccgccgcgcggcgggtcgggttgccgccgttggcaaaatgataggaaagaccaaacccgccaccgggggtgccgatctgtcccagcatggcggccagagtgaccagcatccagtgtttctgctcgccatactgctgacgctgcatgccccagccggccatcagcatagtggtattttcgtggaaaagttgcgcaagttcgcggattttatctgctttaacgccgcagatcgctgctgcccactcagcggttttcgctacgccgtcgctttcgccggtcagatagcgggcaaaaatatcgtagccgctggtgcagcgggtaagaaacgcattatcctgccagtcattttccaccagcgtatgggcaatccccagcatcagcgcgacgtcggtgcccatatgcggcgcgatccactccatcgaatcgccaaagaaatcgacggtttccgatcgcatcggatcgatgcagatcagccgcttaccgctctggcgcagccgatcaaaccacgggatcccttgctcgtcggaggcattccaggcaattttcagcgtgttcagcgggttggcgctccacagcaccaccacttcgctgtgctcgagcaccagcggccaactggtctgctgctgatacacctcattgccgccaacgacgtaaggcatgatcgcctgcgccgcgccggtggagtaatcgccaagatggccggtatagccgcccgccaggctcatatagcgctgcagcagcgtcgccgccttatgcaatacgccgttagagcgccagccgtaggagccggcaaaaatggaggccggaccgtagctgtcgcggatccgccgatgctgggcatcgatcagatccagcgcctgctcccagctcacccgcacgaattcatcctgaccgcggaccccctggggcttgtccggtgaagcaaggaagcctttacgcaccattggatagcgcacgcgggttttgctgtgcacctgatcgcgcactgccgtttgcagcgagttggcaaacggtgtcgccagcgcgccgcgggaagagaggacgttttccccgtccgtttccaccagcatcggtccccaatgggcggcggttaagatggttttggttgcagatgaggttggcaagggcggctcctggtcagcgaatgcaggtgtaatgacggcgtgatgggcaaccgttcaatgttatttacaaaaagagatggtatccggggaattttctccgtaatcgcgcgtcataatcaaccgtcacgttcgctgtgacaaagaataaaaaggattaaggacattaaatgaaaaaacgcgtacttatgattgcggcgctggtcagcggcactctggccatttctggctgcaccaccaacccctataccggtgaacgtgaagcaggcaaatccggtattggcgcaggtattggctccttagtgggcgctggcgtcggcgcgctctcctcttccaaacatgaccgcggcaaaggcgcgctgattggcgcagcggccggcgcggcgctcggcggcggcattggttactacatggacgtgcaggaagcgaagctgcgcgacaaaatgcagggaaccggggtcagcgtgacgcgaaatggcgacaatatcgtgctgaacatgccgaataacgtcaccttcgacagcaatagcgccaacctgaagccggccggcgccaacaccctgaccggcgtggccatggtgctgaaagagtatgagaaaaccgctgttaacgtggtcggctacaccgacagcaccggcagcaaggatctgaatatgcgtctgtcgcaacagcgtgcggacagcgtcgccagcgcgctcatcacccagggcgtggcggccaatcgcattcgcaccaccggcatgggcccggcgaaccctatcgccagcaacagcacggcggaaggcaaagcgcagaaccgtcgcgtggaaattaccctcagcccgctgcagtaagcgcaacctcatgtcgcccggcagccgctctgccgggcaaaatgcttgatatcgctatttttcgcgctaaggtgttggcagattttcagcaaaggaagccaccatggcgaaagcggcgcgtgcaactatcagcgatgtggcgaaagccgcaaagaccggcaaaaccagcatttcacgttatcttaacggcgagaagcatctgctttccgacgacctgttatcacgtattgaaaaagccattgccgaactcgactaccgccccagcctgatggcccgcggcctcaagcacggccgaacccgcctcatcggcctgatcatcgcagatatcaccaatccctactcggtcaacgtcatgagcggcattgaagcagcctgccgggaaaagggcttcaccctgctggtgtgtaataccaataacgagctcgatcaggagctgcactacctggacctgctgcgcagctaccaggtggaaggcatcgtggtcaacgcagtcggtatgcgggaggatggcctgaaccgcctgcagcagtcggccctgccgatggtgctgattgaccgtaaaatccccgacttcgcctgcgatgtggtcgggcttgataacgcccaggccgccaccaccgccaccgaacatctggtggaaaaaggattcgaggccatcctgtttctcagcgaaccgctgggctcggtgaatacccgtcgcgagcgcctgagcgcctttcgcgccacgcttgcccgccaccacggcgtggtggccgaaaacgccgaggtgcagcttaacgacggcgcgatgctggacaacgtcctgcgtcagttccatgcccgccaccgcgggatgcgcaaagcggtcatctccgccaacggcgcgctgacgctgcaggtagcccgcgccctaaagcgcgtcggcctgatctgggggagcgatatcggcctgctgggcttcgacgaactggagtgggcggagctggccggcgtcggtattaccaccctcaaacagccgacgtggcagatcggctacgcggcggtcgaacaggttattcggcgcattgccggcactaacgaccccatccgcgaacgggtattttccggcgagcttatcgtccgcggatcaacctcccgttaacgatccttcgtgatgccgatcataaattaaacatctcgccctttcttatggaaccgataccatctagcgtattaaggagattaagcaacaaacgccgggagtaagagcgcgatggccagaaaaattattgtcgttaccgctgcgtatggtaatgaccatgttaaatccttaggcgggcaggccgccgtcctgccgtttatcgccaacgccggcgcggacggcgtcgaaatccgccgcgagctgtgcagcgcggaagagctcaacgctctgccctcgctggcggccaccattgagcgccacggcctgctggcctgctactccgcgccgcaggcgctgttcaccgacaacggcgagcttaacccggatctcccgacgctgctcgcggaagcgcaaaccctgaacgctctgtggctgaagctctcccttggccatttcctccacaatcagcagttggatgagctgcgcgatatcctcagcgacagcggcatggcgttggtggtagagaatgaccagaccgactgcggccagctggcgccgatgcagcgcttcaaagccgcctgccgggtccatcagctgccgatcaccttaacgtttgatatgggcaactggctgtgggttggcgattcaccggaagaggcggcacgtcatcttgcgccggcggtcagctatattcatgttaaagcggcggagcctcatcatgagaaattccgcgctgtaccgccggatcaggccgccgaacgctggctggccctgctcgataatcttcccgccgacgcgccgcgtggaatcgagtttccgctgactggccatgacctgacggccgtgacccgccgctacgtcaacctgttacgcgaggattaagtcgtggaaaatttagatgtcatcaccatcggcgaagctatggccatgtttgtcgccaccgaaaccggggatctggccgaggtggagcatttcatgaaacgtgtcgccggcgccgagctgaacgtcgccaccggcctggcgcgcctgggtctgaaagtcggctgggtgagccgcgtcggcaacgacagctttggccgcttcgtactgcaatcgctggcgaaagaggggatcgatagccacgctgtggccatcgacaaccgcttcgctaccggtttccagatgaaatcgaaagtcgaaaatggaaccgatcccattgtggagtatttccgcaaaggatccgcagccagccatctttcgccggacgattttcgcgccgactacttcaccagcgcccgccatctgcacctgagcggcgtcgcggcggccctttctgagagctcttacgcgttgctggagcatgcggcgaaggtaatgaaagccgaaggaaaaaccctctctttcgaccccaatctgcgcccggtgctgtggaaaagcgaagccgagatggtggagaaactcaaccgtctcgccttccaggctgactgggttttgccaggcttaaaagagggcgtgattcttaccggccagcagaccccggaagggattgccgatttctatctctcccgcggcgtcaaggcggtagtcattaaaaccggctgcgacggcgcctggttcaagagcgccagcggcgaacagggaacggtcgatgccattaaagtcgataacgtcgtcgataccgtcggcgccggcgacggctttgccgtcggggtgattagcgccctgctggaaggcaaaaccctgcttcaggcggtgaaccgcggcaataaaatcggttcgctggcgattcaggtccagggcgacagcgaggggctgcccactcgcgacgcgctgggcgagtaacttttctacgcaacgataacagccgtcctgtaccctacctgcagcgcggcacagcagcgtccgtttcgacggacgtatgtctcctcattgacagaggcaagcctatgaatagctcaacaaatgcaacgaaacgctggtggtacatcatgcctatcgtgtttatcacgtatagcctggcgtacctcgaccgcgccaacttcagcttcgcctccgcggcaggcattaccgaagacctgggcatcaccaaggggatctcctccctgctgggggcgctgttcttcctcggctacttcttcttccagatccccggcgctatctatgcggagcgccgcagcgttcgcaaactgatctttatctgcctgatcctgtggggcggttgcgcctccctgaccggtattgtgcataatatcccggcgctggcggcgatccgctttatcctcggcgtcgtcgaagccgcggtgatgccggcgatgcttatctatatcagcaactggttcaccaaatcagagcgctctcgcgccaacaccttcctgatcctcggtaacccggtgacggtcctgtggatgtcggtagtctccggctacctgattcaggccttcggctggcgggaaatgttcatcatcgaaggggtgccggcggtgatctgggccttctgctggtgggtgctggtgaaagataagccgtcgcaggtgtcctggctggcggagagtgaaaaagcggcgctgcaggaacaactggatcgtgaacagcaaggcatcaaagcggtgcgtaactatggcgaagccttccgctcccgcaacgtgatcctgctctgcgcgcagtattttgcctggagtatcggcgtatacggctttgtactgtggctgccgtcgattatccgcagcggcggtgaaaatatggggatggtggaagtgggctggctctcttctgtcccgtacctggcggccaccatcgccatgatcgtcgtctcctgggcctcggataaactgcaaaaccgtaagctgttcgtctggccgctgctgctgattggcggactggccttcatcggttcctgggcggtcggcgccaaccacttctgggtctcctacaccctgctggtggtggccggggcggcaatgtatgcgccttacggccccttcttcgccattattccggaaatgctgccgcgcaacgtcgccgggggcgccatggcgctgatcaacagcatgggtgccctgggctccttctgcggctcgtggtttgtcggctacctgaacggcgccaccggcagccccgcagcgtcctatatttttatgggggtagcgcttttcgcctcagtatggctgactttgattgttaagcctgctaataatcaaaaccttccacttggcgctcatcacgcctgaacgactcatactacggagattcgcatgaagccgtctgtcattctctataaaacgcttcccgacgacctgctacagcgtctggaggagcacttttccgtcactcaggtgaaaaacctgcggccggagaccgtttcgcagcacgctgaggccttcgcccaggctgaaggcctgctgggctccagcgaaaaggttgacgccgcgctgctggagaagatgccgaagctgcgtgcgacctccaccgtttccgttggctatgacaacttcgacgtcgaggcgctgaacgcccgccgggtgctgctgatgcataccccgaccgtgctgaccgagaccgtcgccgatacggtcatggcgctggtgctgagtaccgcgcgtcgggtagtggaagtggcggagcgcgtcaaagcgggtgaatggacgaagagcattggtccggactggttcggcacggatgttcaccataaaaccttaggcatcgtcggcatgggccgcatcggtatggcgctggcgcagcgcgcccacttcgggttcggcatgccgatcctgtataacgcgcgtcgccagcatccgcaggcggaagaacgcttcaatgcccgctattgcgatctcgataccctgctgcaggaggctgactttgtctgcctgatcctgcccctgagcgaagagactcaccatctgttcggtcaggcgcagtttgccaaaatgaaatcttccgccatcttcattaacgccgggcgtggcccggtagtggacgagcaggcgctgatcgccgccctgcagaacggtgagatccacgctgccggtctcgatgtgttcgaacacgaaccgctggccaaggactcaccgctgctgagcctgccgaacgtcgtcgcgctgccgcatatcggctccgccacccatgagacgcgctacaacatggcggcctgtgcggtggacaacctgatcgacgccctgaacggcaacgtagagaaaaactgcgtcaatccgcaggtaaaataagccataaaaaaacccgggtaacggcggcaaccgccctccccgggttctttttgcatcctgtccatcatcctgcccgttcgccgcagccaacgtcagccagatgaagcattaacgggtggcgttcaccgccgccgtccatgcctgattaaacgcctgatgctgcgccgccagcggcccaatcagcgcattgtactggctggcctgctgggaggtcgggaactgaatgccgttggcgacaaagctcacctgcgtcccctgctgagcgacaaaatccccaacctgaaccagctgctgggtaaagatctgcgcggccgggatcagcggctgcagcgcgtcggctggcgccgtcaccaccttggcgtaaacctgatcgaagaccggcttgagatcgtcagcctgcttcagcgcgccatgcgcggcatcggcctgcattttcgcattctgcagctgctggctgagcacgcccagcgcgccgttcgcctgacgcagcggctcacgctgggtcatataatcctgcgggacgcggatcgcattgacgctgtccactaccgggcgcagaccagcgtccatcgcctggctcacctgctgcgagtaaccgtagatcaccgcgtagtcagagacaaaaggcccaaactgttttttctgatcggcggtcagcgtcggcagacgttcaccgctacgcatcgccgtattctgcaggaagtcgataaacgctttgcgctgatcgccctctttatcaaaacacccactcaggctaaccaccatcaataaggccgccatagccgcaaaccagcgagagcaggactttcctgtcgccatttttttactcctttcagccaaaaaaagcgcacaacggcacacacgtgccagacgctgacaaggatagtccagctcggcctcgcaggataccctttcctgctaatcttacgcgggaaaaacaccattttgcacgccatcgtcgcgctgtagaacgtctgttatgcgcatcacaaatatggtcttaagatcaggtggatcagaacttcataagccattgatattaatataaataaaaagcaacaacccggcactgcgccttaaagcggacgataatcgcacgctttggcacgcgtctggattgcctgcctcgcacttcaatgatttgatgaatgagcgattaacggcgatatgttcgattatcgcacaaatcaaactcaacgacgcgaaggcgacgataataataaacctctgtccctcgctcagtctgccaggaaagccgtatgactaagacaaccatcgacattcaggcctttatcaacgagcaccccttcacccgctaccagtggatgattcttgcgctctgctttatcaccgtcgcgatggacgggttcgataccgcaattatcgggttcatcgcctccgacctggtgcaagagtggggcgtggaaaaatcggccctcggcccggtgatgagcgccgcgctggtgggcctggcggtcggcgccttaaccgcagggccgctggctgaccgcatcggccgcaaaaaagtgctgatcatgtcgatcgtggtgttcggcggattcagcctgctcaccgccttcgccaccagccttaatcagctgacgctgctgcgcttcctgaccggtctgggccttggcgcggcgatgccgaatgccgcgacgctaatgagtgaatatgcgccggagcgccgtcgggcgctgctggtgaacctgatgtttgtcggctttccgatgggatcttcgctgggcggctttttatccgcctggatgatcccgcactatggctggcagagcgtgctggtgctgggcggcgtgatgcccctcctgctggcggtggcattaatattcctgctgccagagtccgtccgctatctggtagtgaagcagcacccggcgcagcgcattgctgctattctgcgccatatcgcgccgctgccgaagacagtggaatttgtactacgcgaagcaggccaggtgaaagagaaatccgcgatcggcgtcattttctctcctcgctacgcggtgggtaccgtgatgctgtgcctgacctactttatgggtctgctgattttctatctgctgaccagctggctgccgctgctcatccgtgaaaccggctcctcgatgagtcaggcctcaattatcaccgccctgttcccgctcggcggcgggattggcgtgctgatcctcggtgccctgatggacaagatcaaccccaataaagtggtggccgtcggctggctgctgaccggcgtttttgtctgcctggtggggttctccaccagcagcctggcgctaatgggagtgatggtctttatcgccggcagcattatgaacggcgcccagtcgtcgatgccggcgctggcggctggcttctatccgacgcaggggcgcgccaccggcgtcgcctggatgctgggtatcggccgcttcggcggcatcctcggcgcgttcagcggcgccttcctgatgcaggctcagctctcctttgagaccattttcaccctgctggccatcccggcgttcctgtcagccattgcgctgctgatcaagtaccgggtcagtaaatccgtgccggcgacgacagatgaggcgagaagcctgcagaaagcctaaccctataagccggcgccccgcgccggctttgccgcttttttcttatccgtttacaaaaattttcgaagccacctcatcgcgttaataatcattcttttaggctacgctgccgtttggctgtcggggcagattcgatagcctgttggcaaataatcaccgacgttaccatcccttgcgccattttctgactattcttaatgagctatagaaaaatcttttccgctgtgtgataaaaggagttctcaatggaatataaagatcccgtgtttgaactgctgagcagcctggaacacatcgtttttaaggatgataatcagaaacttacctcaaaccgtaagtccactgtgtttagtgaatttgaacagctgcgtaaaggcactggacttaagattgacgactttgccaacgtcatgggcgtgagcgtcgccatggtaagagagtgggagtcgagacgggtcagaccgtctcccaccgagctgaaattgatgcgcctgattcaggccaatccacagctttcacgacaattactcgattaatctcgcgcgcagcggcaaaggccagtaagggagcttttgccgctgcaccgtaaaaaaaagtttgctatcaggtgctgaacgtgcgttaatgctcgcaggtttgatgtacagaccacagagcagtcgaatagagcagtccttctaaggttatccaaagatacccccgtagtgaactttccctttatcgctttaaatctgtagtccagacccctacgccgcaaggctcacttatttttttaaaggtaattcactatgtccggtaaaatgactggtatcgtaaaatggttcaacgctgacaaaggcttcggcttcatcactcctgacgatggctctaaagacgtgttcgtacacttctctgctatccagaacgatggctacaaatccctggacgaaggtcagaaagtatccttcaccatcgaaagcggcgctaaaggcccggcagctggcaacgtaacttctctgtaagttcaagccgctaagaatcgagaatccctgcctgatggcggggattttttttatctgtcgccagtagccgccagcataagatggcggctaccgggcattcagagcagggaaaagtgccagcccgtctcccgccacgccagactatgggtcagcttcagaccttgtaaaaacgcctcatcatgcgacaccaccagcatcgcgccgggaaacgccgccagcgcgctttcaatagcctgcgtcgatgctaaatcgagatggttggtcggctcatccaacaaaagcagttgggcaggctcgcgtcgccagagcacgcacgccagcgccgctttcaggcgctcgccgccgctgagcgccgacagcggcagagtgaccttatccgcgcccagctggagctgcgccaggcgggtgcgcaggaggccctcatccagtggggtatcttccaggctcaggtgcgccattaccgacagggataaatccagctgcgtcagatgttgatcgaggtaagcggcgctctccgaaagccggacatcgcctgacgcggcctgctccagccccaacagcgttttcagcaaagtggttttgccacagccgtttggcccctttagcgcgatgcgcatcggaccatcgatacgccagttcagcggcgcagccggcgcatggtcgagctgtaatgactccaccaccagcacctgcttgccggcggccacttcgctacccggcagggtgaacatcaccggattgtcgtcttctatccgctcccgcgcctgctgcacggcggcattcagactgctgttctgttcacgatgctgacggcgcagcgctcccgggcgctcttttgccgcgcctttgtacttcacgcgttcgaaggaggcgatatttagcgtatcaacggtacgcagcgtctgagccgagcgccgctgggcggcgtcatgctccttttgcattcgcgcgcgggtgcgccgtcggtcggtcacggcatgcttcagcgccgcgcgcgcggcctgctgctccgccatacgctggcgctgatattcagcatagttgccgccgtagctgcgcagcgccgtcggcgtcagctcaataatcctcggcatccgcgtcagcagctcgcggtcgtggcaggcgatcagagccccgccctgccagctttccagttggtgatagagccactcccgcccctggcggtccagatggttggtaggctcatccagcagcagataatcggcgcccgagacgaaggcgccgcacagcagagccttcatccgctcgccgccgctgagtgaaaacgcggggcgatcggcagagaacggcgggagatcggcttcacggaacgctaaactcaggcgatcggtgagatcccagtgaccatctaacagatcgaaatcgtcggccagcccttggccctgttcaaggcgagacaaggcggcaaaaaccgacgcatagcccagcagcgtagcgagggtggtctccggcgtgagcgtcggctgctgcgctacccaggcaacggcggcggcgcgctcaatatggccgccggcaggagaatcaaggcccgccagcagacgcagcagacgcgtcttgccgacgccgttccggccgaccaggccgcaaagggacggttccagcgagacgctgagcggaccaaacagggtctgccccgtcgcaaactgacaggtgacctgatgtaaaacaaaagcggggatgtgggcgcaatgagccataagcactcctgaatgaaatcaatactcccctacccgcaaggtctgcgaggtaaggcgtgaaattcatcagtcgtgtttgttcatttgtggggcgcgctccggtgagacgagggattcgtcgggacataggatagccacactccggtatgcgttgcaagcctgttttattcaacgatcttgtaaaaataaaaaggcctcctgatatcaggaggcaaatgatttatttggtgaacaatgaaagggtgcattgagaatgcctgacaccgcaagcatggtggggatagatccccaccagatgctcttactgtttaatatcacaggctaagaatgccaccagctcaatatttccctgcctgcgctgtaattcacatagcgaatcacgaaccatccaggtcaataataaaatagtgaagcaaatcactactaagccaaacaacagatacttttgcggcattcctcgcctccagtgttgattttcaacaagtaagaggctactcttatggtgttcatgcataggggagcctcactttgattactatcaggtggggcttttctctgtctgtctcccgctgaatacctgagacacatagtctcaagcacccgccgccattctagcgtaaatacctctcggaattatgtttatatattcctaaaacgtttcttctcgatgaatgcaaataatgaagatatcaatgacagaattattaacggttcacctattcatatttcacgtataaaaaaacctgccctgaggcaggtcttttattatttccgatacgcttactgcagcagagaaatatccgccacctgcaggaacagttcacgcagtttggacagcagcgtcagacgattgatgcgaacatctttgtcttcagcgttaaccatcacgttctcgaagaactcatccaccggctcgcgcagcgcggccaactcaatcagcgcatcctgataacggcctgcggcgaaatacggctgcagcttgtcgcgcagcaccaccagattacccgccagcttaatttccgccgcttctttcagcaccgaagcgtgaacgatgtcgttcagcgtctcatcggatttcgcgaggatgttagagacacgtttgtttgccgccgccagcgcggaggactcttccagagtacggaagtgcgataccgccttcatacgcgcatcgaaatccgccgggcgggttggacgacgcgccagtaccgcctggatcgtgtcgacgccgtagccttcgtcctgataccaggcacggaagcggcccagcataaagtcgatcacatcatcaaccacgttggcgttggtcagcttctcaccgtacagacgaaccgcttcttcggtcagcgtctgcagatcgagatccaggttcttctcaacgatgatacgcagcacgcccagcgcggcgcgacgcagcgcaaacgggtctttatcgcctttcggatgctgaccgataccaaagatacccgccagggtgtccatcttatcggcaatcgctaccgcgcaggccaccggattagacggcagcgcgtcgccagcaaatcgcggctgatactgctcgttcagcgccacggccacgtcttccgcttcgccgtcatggcgcgcgtagtgcatccccatcacgccctgggtgtcggtgaactcgaagaccatgttggtcatcaggtcgcacttggacagcaggcccgcgcgggttgcgtggttcacgtcagcgccaatctgttcggcaatccagcccgccagcgcctggatgcgatcggtcttgtcgcgcagggtgcccagctgctgctggaacagcacggtttccagacgcggcaggttatcttccagacgttttttacggtcggtattgaagaagaactcggcatcggccagacgcggacggaccaccttctcgttaccggagatgatctgctgcggatctttggactcgatgttggccacgaagataaagttcggcagcagtttgccggcgttgtcgtagaccgggaagtacttctggtcgcccttcatggtgtaaaccagcgcttcagacggcaccgcgaggaatttttcttcgaacttcgccgtcagcaccaccggccattccaccagcgaggtgacctcttccagcaggctttcgctcagatcggcttgaccgccaatcttacgcgccgcctcttgcgcatcagctttgattttggctttacgctgttcgtaatcggcgatgactttaccgcgctccagcaggatctgcgggtactggtcggcatggtcgatggtgaactccggctcgcccataaagcgatggccgcgaatcacgcgatcggacggaataccgaggatagtggccgggatcactttgtcacccagcagcaaagtcaccgtgtgtaccggacgcacgaagtggacgtcagacgcgccccagcgcatcagtttcgggatcggtagcttcgccagcgagctggcaatcatgttcggcagcagcgcttcggtgctttcacccttcacatgggcgcgatacagcagccactcgcctttgtccgtggtcagacgttcggcctgatcgacggtgataccgcagccgcgcgcccagccttcggccgctttgcttggcttgccttcggcatcgaacgcctgggcaatagccgggccgcgtttttccacttcgcgatcggcttgcgccgccgccaggttggccaccttcagcgccagacgacgcggggcggcaaaccattccactttaccgtgcgcaaggccagcgttatccagctccgcggtcacattcgcagcaaaagattccgccaggctgcgcagcgcttttggtggcagctcttcagtgccgatttccaccagaaaagtattctcagacatggccgcctcttatttattcttgttgcacatcgggaagccgagcgcttcacgggaagcgtagtacgcttccgccactgctttagtcagggtgcgaatgcgcaggatatagcgctgacgctcggtgacggagatggctttacgcgcatccagcaggttgaagctgtgagccgctttcagaatacgctcgtaggccggcagcggcagcggggtctccagcgccagcagctgctgggcctctttctcatactgttcgaagcaggtgaacaggaagtcgacgtcagcatattcgaagttataggtggactgctccacttcgttctggtggaacacgtcgccgtaggtggttttccccaacgggccatcgctccagaccaggtcatagacgctgtccacaccctggatgtacatcgccagacgctccagaccgtaggtgatctcgccggtcaccggcttacactcgaggccgccgacctgctggaagtaggtgaactgcgtcacttccatgccgttgagccacacttcccagcccagaccccaggcgcccagcgtcgggttttcccagttgtcttcgacaaagcgaatgtcgtggatagtcgggtccatacccagctctttcagcgacccgaggtacagctcctggatgttgtccggagagggtttaatcaccacctggaactgatagtagtgctgtaaacggttcgggttttcgccatagcggccatcggttggacgacgggaaggctgcacgtaggcggtcgccatcggctccggtcctaacgcgcgcaggcaggtcatcgggtgagaggtgccggcgccgacttccatgtccagtggttgaacaatggtgcagccctgacgagcccagtaatcctgtaaggtcaggatcaggccctggaaggtcctggtatcaaacttttgcatatgatttcgtgctggatacgtgtggatttaaaggaaggagtcagtatacccgctggctgcgagatatacagtacgaaacggcgttgtttcaggaaaacggacgaaatttacgccaggcggggtcgattcagcgcatcgaaagatgcataaactggccgtccgggtcaaaggaacagatgaaacgctcattcttgccggtacggccagaaagctcatagctcgcctggaattgttcaaagtggttcacgtcaacgagctgcgtttgcgtgttatagcggatagccgcctgatccttgcaaagctgcgccatattgagcgtggtttgcggcgtaatacgagcgcgctgcgctttttgcgtcggcggggagacggtctcgctgcagcccgcgaggagcagcaccagcatgacggaaacaacacctttcaccacgttctcctccaccgccttgttagcaagttgttatcctaaagattcagtattacaggtattttgcgaatatcatgaaactgcgacaagtctgtgaccgaaaactcagactaatctattgcgacaccgggaaaccgggcaggtcatatcttatttcgccagcagacattgagggactgatgcaagaaaagatacactggatcaccaacctgcgcggcatcgcctgcatgatggtggtgatgatccacagcaccagctggtatatcactcacccccatgcgattaccctgctgcaatgggatatcgccaatctgctcaattccgcctcccgcgtcagcgtgccgctgttttttatgatctcgggctacctcttttttggggaacgcagcgcccagccgcgccatttctggcggattggcctgtgcattgcgttctatagcgcgctatctctgctgtatatcacgctgtttacccatatcaacgtcgagctgtcgttaaagaatttgctgcagaagcccgtcttctaccacctgtggtttttctttgctatcaccgtcatctacctgctctcgccgctgcttcaggttaagtccaccagtagcacaatgctgctggcgctgatggcgatcctcggcattctggccaaccccaatatggtcagcgttaaagccgccgggattgagtggctgccagtcaacctctatatcaacggcgacaccttctattacgtgctctacggcgtgctgggcagagccattggcaccctggacaccgataaaaaatggctaacaccgctctgcgccgcgctgttcatcgccgccgtgtgggtcatttcccgcggcacgctgcatgagctgcgctggcgcggagacttcggcgacacctggtatctctactgcggaccggcggtgtttgtttgcgcggtcaccctgctgacgctggccaaaaactggcttaacgcgcgtcccctgcccggtatcgcctgcattgcgcgacattcgctggggatctacggctttcatgccctgatagtgcatgcgctgcgcgccagccatctggagctatcccgctggccgctgctggatattgtgtggatatttagcgccgccctgctcggcagcctgctgctgtcaggcctggtgcagcggattgatagccgccggctggtcagctaatggtccgccgcccgggggggcccgacttacgtctcaggcccctcttccgtcacgctgagaggttcccgtaagcgcgtcgggtcccagacatcacgcacgtttttctgtaccgcaacagcgccaaacaggctcaaaaaatacgccagcccatagaaccctttctcgctgagcagcagagtggcattccacagtccgataaccagcagacctacagcgataacgaagaccaccagacaggtggtgtagtacagcgcggtggtcggaatggcttcatacttatcgcgcaccgtcttttgataagatgccgcggcaaacagccccagtaccaggacggcaaaataatagcctttctcattcaactgcatatcggcattccacagccccaccagataggtgacgatgccgccgatcagggcaatccaggagatcaaatgaaacgcaggagaatacgtcgcgtgcttgttttccatcactttttaccttttacgcgcctcggggcggcgcttattccgttttttgcatcgcgcgggcgatgcgggtccgttcgggggttgccgatgcgccatataagcagacaaaccatgccgcgatatagacggctttttcatgccagtctgccggtacataccaggcgccgaccagcagcaggccgaccgatagcagcagcaccagccggcataaggcaataaaaccgtcgtcctgttcctgccactgactggcgcgctgatgggcgagaacagcaaacatccccatcaccagcacgccgagaaaataccctttgccgctgaacagcgggcaggtccgccagataccgagcagataaaccagcgatcctgccgccatcatccccctggcaatattgcgttttgtgatcatctcacctccctggtcgacaggggctgattatgaccgactccctcggcgatgcctcagattacgtacgacaaagcggagatttcggaataaataaatacgcatttatggatggatgtagccgggacattcaggaagggaatccgcccggcgctgccggacggactgaggctaagacatcagcggtttcagttgctgataaatctggcggaaggtttcccgctgcggcgcatagtgggccacacggcgatcgtccgggcgatgggcttgttcaagcggcagcggcttcagcagcccggggcggtctgcctcgtcgtgaaccgccagctgcgccagcctggccgcccccagcgccgggccgacatcgcccccggtacggtaatcgagctgcaggccgctgatatccgccagcatttgccgccagtaagcgctgcgcgccccgccgccgataagcgtgatgctctgcggcttgatgccgcaggcgtgcaccacgtccataccatccgccagcgcatagcccaccccttccagcaccgcccgcgccagctctgccggcccatgctgatgcgtcaggccaaaaaagacgcccttggcctgcgggttgttgtgcggcgtgcgttcgcccgacagatagggcaggaaccacaccggaccggcgctttcatccgccgtctgcgccgccgcgatcagcgccggcacgctggcgagaccggttaattttgccgcccagtccagacaggaggccgcgctgagcatcaccgacatcaaatgccagcggcccggcagggcatggcagaagctgtgcaccgcgctttcgggtttgctaaggaacccttcactgacggcgaagtagacgcctgaggtgcccagcgacagcatcgcctgaccggcatcggccatgccgaccccgaccgcgcccgcggcgttgtcgcccccgccgcccaccaccagcgccggcggcatattccacgcctgcgccacctcaggtcgcagttgcccggtgacatcgctgccttcgaacagcgccggcatcgcatcccgactgagatcgcaggcggcgagcatctcgtcgctccagtcgcgccgggcgacgtccagccacatcgtgccggcggcgtcagacatatcgctggcgagctcgccggtcatgcgcaggcgcagataatccttgggcagcagcactttatcgacctggctgaacaccgccgcctcgtggcgctgtacccataagagcttcggcgccgtaaagcccggcatcatcaggttgccggtgatctgccgggaagcgctgactttgtcttccagcagctggcactcttcggcgcagcggccgtcattccataaaatggccggacgcaacacctgtaacgatttatccagtagggtggcgccgtgcatctgtccggcaatgcccagcgccttcacgtcgcgcaggctatgctgcgcgcccagggctttcatcgccgtgtccgtcgccagccaccactgttcgggatcttgctccgaccacagcggatgcggacgcgagacggtgagtttttcggtatgcgatgccactacctcaccctgctcattgagcaggatggctttgacgcccgacgtccccagatcgatgccgatatacatactccctctccttaaacgcgcgccacggctgagcgtggcgcgaacagagcatcctggttgcggcgccggtcaccccgggcgccgccgcatgattacttgtcaaacagataatggttgaccaggttttccagttgttcctgctggccgctgcgatgctgcggcgccagctgatgctgagcggcatactgggcaatatcgctcagggtcatctgcccgttaaggatctgctgccccagctcaccgttccagccggcgtagcgtctggccacgcgcttatccagttcgccgtcctcgatcatccgcgccgcgaccttcagcgacagcgccatggtatccatcgcgccaatatgaccatagaacagatcgtatttgtcggtgctctgccggcgcactttcgcatcaaagttgagcccgccggtggtgaagccgcccgctttgaggatttcatacatcaccagcgcgttctcttcgacgctgttcgggaactggtcggtatcccagcccagctgcggatcgccgcggttggcgtcaacggagccgaacagccccagcgcaatggccgtcgcaatttcatgatggaacgaatggccggcgagcgtggcatggttagcttcaatattcagtttaatctctttttccagaccaaactgtttgaggaagccgtaaacggtagaggcatcatagtcatactgatgcttggtcggctcctgcggtttgggctcaatcagcagcgtgcctttaaagccgattttatgcttatgctccaccaccagctgcataaagcggccaatctgctcacgctcctggcgcaggtcggtattcagcagggtttcatagccctcgcgaccgccccacagcacatagttttcaccgcccagttgatgggtggcattcatggcggtgaccacctgggtggccgcccagctaaatacttccggatccgggttggtggccgcgccggcgccgtagcgcgggttggtaaagcagtttgcggtcccccacagaagcttcacgccgctctgctgctgtttctcagccagcacctcgaccatccgggcgaagttattgctgtactccttgagcgaagcgccttccggcgagacgtcaacgtcgtggaagcagtagtaaggcacgttgagtttatggaagaattcgaacgccacatcggctttgcgtttggccatctccagggcgtcgccaggctgctgccagggacgatcaaaggagcccacgccaaacatatcggcgccattccagcagaaggtgtgccagtaacaggccgcaaaacgcagatgatcttccatccgtttgcccagcaccagttcatccgggttgtaatgacggaaagccagcgggttagtggatttcgggccttcgtaacgaacgcgatcgagttgatcgaaataggtctgcatagagaactccatattcagagatgcggcgaataaccaatcagataccctaaataattcgagttgcaggaaggcggcaggagcgcaagtccccggtaaccaggggcggagcaacgaatgtcaccaacccacctacaacttgaagtatgacgggtttaagccaatatagaatttcgctttcattttcctcaattacgttatttcacaccgccattgagagaatccacaaacgtgcgccagctcgcaaaaataatatccagtcgccgttgcgccgctctgtcagagacagtccagtgcaataataagagcgtgcatgaataaaatacgatcgccgtcataatttgcacattaaacgaaatttcataacggcaaaataagaaccggtaattgccagccctgctttccgcgttaagaatctgtaacgtatccgcaacctcatgtatcaaacattattttccgttcgtcttacctacccttacaaaaaaggtatcgttattatgaagataaagaacctttgccttacgctttgcgccagctccctcctgctcgccagcatggcggggatggcgaaagaagtgaagattggcatggccatcgacgatctgcgtctggagcgctggcagaaagaccgtgatattttcgtcaataaagcggaatccttaggcgccaaagtttttgtccagtccgctaatggcaatgaagaaacgcagatgtcgcaaattgaaaacatgatcaaccgcggcgtcgatgtgttagtcattattccttataacggccaggtactcagtaacgttattaaagaagccaagcaggaaggtattaaagtcctggcctatgaccgtatgattaataatgccgacattgatttctatatatctttcgataatgaaaaagttggtgaaatgcaggcgcaaagtctggtcgacaaagtgccgcagggtaattatttcctgatgggcggttcgccggtggataataacgctaaactgttccgcgccggacagatgaaggttctcaagccgtatgtcgatgatggcaaaattaagattgtcggcgatcagtgggttgacggctggctgccggagaacgcgctgaaaataatggaaaacgcgctaacggcgaataataacaagatcgatgccgtggtcgcctccaatgacgccaccgccggcggcgccatccaggccttaaccgcccaggggctggccggcaaagtggcgatctccggtcaggatgccgacctggcgggcgtgaagcgcattatttccggtacccagacgatgaccgtctataaaccgattaccaccctggccaccaacgccgctgaaatcgccgttgagctgggtaacgataagcagccgaaggccgataccacgctgaataacggcttaaaagacgtcccttcgcgcctgttaacgccaattgaggtaaataaagagaatatcgacgccacggtgattaaagacggtttccataaaaagagtgaactgtaatggctgacgccccgctgcggggcgtcattttcatcccgccggatatcactgttgcggagtctttatgacctggctactcgaaatgaagaacatcaccaaaaccttcggcgctgttaaagccgtggataacgtcagcctgcgcctgaacgcaggcgaggtgttctcgttatgcggtgaaaatgggtcggggaaatcgacgctgatgaaggtgctgtgcggtatctatccgcacggaagctatgagggcgagattatttttgccggcgaaacgctgcaggcaaaccatattcgcgataccgaacgcaaaggcatcgccattattcatcaggagctggcgctggtgaaacatctcaccgtgctggagaatattttcctcggcgccgagatatcccgccatggtctgctggattatgaaaccatgacgctgcgctgtcagaagctgttggcgcaggtcaatctgcccatttcccccgatacccgcgtcggcgacctcggccttggtcagcagcagttggtggagatcgccaaggcgctgaataaacaggttcgcctgctgatcctcgacgaaccgaccgcctccttaaccgaacaagaaaccgcgacgctgctggcgatcgttcgcgatctgcaaaaccacgatatcgcctgcatctatatctcgcataagctcaatgaggtcaaagcgatctccgatacgatctgcgtgatccgcgacggccagcacatcggcacccgcgatgccagcggcatgagcgaagacgatatcatcaccatgatggtcggccgcgagctcaccgcgctctatcccagcgagccgcacgcccacggcgaggagatcctgcgggttgaacatttaaccgcctggcacccggtaaaccgccatattaaacgggtcaatgacgtctcattttccctgcgtcgcggagaaatcctcggcatcgccgggctggtcggcgccggacgtaccgaggcggtacagtgcctgttcggcgtctggccggggcgctggcaaggggagatctttattgatggccagccggtgagcatctctaactgccagcaggccattgcccacggcatcgccatggtgccggaagaccgcaaaaaagacggcatcgtgccggtgatggcggtgggcaaaaacattaccctcgcggcgctcaaccagttcaccggcgcaatgagtagcctggacgacgccgccgagcagcactgcattcagcagtccattcagcgtttgaaaattaaaacctcctcgccggagttggcgattggccgtctgagcggcggcaaccagcaaaaggcgattctggcgcgctgtctgctgctcaatccgcgcattctgatcctcgacgaacccacccgtggcatcgatatcggggcgaagtatgaaatttataaactgattaaccagctggtgcagcagggcatcgcggtcattgtcatttcatccgaactgcccgaggtgctcggtctcagcgatcgggtgctggtcatgcacgaaggcagactaaaagccaatttggttaatcaacatctgacccaggaacaggtgatggaagccgcgctgaggagcgaacgccatgtcgaagaacacgtcgtctgaaatcaaactcaccccaaccgcccccgcggccctgccggcgctgaaggggctgaatctccaggtcttcgtgatgatcgccgccatcgtcgtcattatgctgtttttcacctgggttaccgatggcgcctacctgagcgcacgcaatatctccaacctgctgcggcagacggccatcaccggcatcctcgccgtcggcatggtgtttgtgattatttcggcagaaatcgacttgtccgttggctcgatgatggggctgctgggcggcgctgcggcgatctttgacgtctggctcggctggccgctgccgctcaccattctggtgacgctggtgatgggcctgctgctcggcgcgtggaacggatggtgggtagcctatcgcaaggtgccctcgtttatcgtcacccttgccgggatgctggcgtttcgcggcattctgatcggcatcaccaacgggaccaccgtctcgcccaccagtccggcgatgtcgcagatcggccaaagctacctgccagacggcatcggcttcggcatcggcgttgtcggcatggcggtgtttatcgtctggcagtggcgcgggcggatgcgccggcaggcgttaggtctggcgacctcgtcctccaccgccgccgtcggccgccaggccattaccgcggtgattgtgctgggcgcaatctggctgctcaatgactatcgcggcgtaccgaccccggtgctgatcctcgccgccctgctgctggcgggcctgtttatggccacccgcaccgcctttggtcgccgcatctacgccatcggcggcaacctggaggcggcccgtctgtccgggattaacgtcgagcgtaccaagctggcggtgtttgccattaacggcctgatggtcgccattgccgggctaatcctcagctcacggctcggcgcggggtcgccttcggcgggcaatatcgccgaactggacgccatcgccgcctgcgtcatcggcggcaccagcctggcgggcggcatcggcagcgtcgccggggcggtaatgggggcgtttattatgtcggccctggataacggcatgagcatgatggacgtcgccaccttctggcaatatatcgttaaaggcgccattttgctgctggcggtgtggatggactctgccaccaagcggcgcgcataaggagagactctctgaagaatgtctgaattctttgcgctaccgccaaacttcgccataaggcgcttgaaatatctcgggcattagccggtagtgtatacccaacatcattcgggttgcagacggcgcccccggccgcgtaccggcgtacgtggccgggatgagtggtaagtcaggccatcggcaacatcttgaatgaaggggtatgaccggggttagagcaggaacattatctatgtttgaaaagcgtcaccgtattacgctgttatttaacgccaacaaagcttatgaccgccaggtagttgaaggtgtcggcgagtatctgcaggcctcccagttggagtgggatatctttattgaagaggactttcgggcacgcatcgaaaacatcaaagagtggttgggcgatggcgtcatcgccgactatgacgatcccgaaatcgaaaagctgctggccgatgtccacgtgcccatcgtcggcgtcggcggatcttatcatcagccagagcagtacccgccggtccactatatcgccaccgacaacgccgcgctggtggaaagcgcttttctccatttaaaggaaaaaggggtgcaccgcttcgcgttttacggactccccgcctccagcggtaaacgctgggcggtagagcgcgagtatgccttctgccagctggtcgcgaaggagaagtatcgcggcgtggtctaccaggggctggagacagcgccggagaactggcagcacgcgcaaaaccggctcgccgactggctgcaaaccctgccgccgcaaaccggcatcatcgccgtcaccgacgcccgtgcccgccacgtcctgcaggcctgcgagctgctgcatatcccggtgccagagaaactgtgcgttatcggcatcgataacgaggagctaacccgctatctctctcgcgtcgccctctcctctgtcgcccagggcacccgccagatgggttatcaggcggcaaaattactccaccggctgttgaataacgaggccctcccgctgcagcgccagctgatcccgccgatgcgcgtcgttgagcgacgctccaccgactaccggtcgttaaacgatccctccgtgatacaggcgatgcattacattcgcaacaatgcctgcaaaggcatcaaggtggaacaggtgctcgacgccgtgggcatctctcgctctaatctggaaaaacgcttcaaagaggaggtcggggagaccatccacacggtgatccacagcgaaaaactggaaaaggcgcgcagcctgctggtgtccactagtctgtcgatcaatgagatttcgcagatgtgcggctatccgtcgctgcaatatttctattcggtgtttaagaaggagtacgacgtgacgccgaaggagtaccgcgatcggcacagcgaggtgatgctgtagggtaaaaaatgcccggcgacaaggccgggcatccggattacagatgggcggcgatgagccgctgattgtcctgatacatcgcgaagagatagttgttgtagctcgaccctttggtcgaataccccttcagcttatgaatcatggtgctggcggttacttcctgatccgccttgcgcagctgcaggcgcgacttgcggaaagaagaataggccgggtgggtgttcaggtttgttacgtaagcctgcaccgactgctctaccgactcaaactgcgagtaacctttcatcgcgccgcggcagcgaccggcgccgcacttcatgccgaacaggttgttattctcgcgcgccagcctggaggtaccccagccactttccgccgccgccatggtcgccaccatgctgttcggaataatgtcgacacgctcaagcagcgcgttccagggcacatgacgcgtattgcctgaccacttcaccttataacgggaagcgatatccttcaggcgcgccttctcagtcggtgaccagcgagcatcgtactgcttggaaataagccagttacgatccgcagtaatcgcctgattctgcttggtaatataaggcatgaccgtccggagaaacgcttttttccttggtgttccggaagggtattttcgcaagtcaggaagtgaactgctctttacactattgcgagaatactcttgtttactgcttaccttagtactacttatcttctttaccgttggggctttatgactctttgtcgctgtgtgcgttgtcgccaacacactacctgaaaagatgcaggttagtaacataagtatggcggccccatatcgtcgtatgggattcgatatcatcaggtctcctggtcggatatatgcattccaacaccttgtttttcacaaaaaaacgatagctgaatcgctaatagtatcaaaaatacgcactgagggcatcaacagaaatagtccaattccgaattgctgtcatctgaaatcggtttctgcggcgcatcgccagcgcgaaaatgctagcttcgtctcatttttagcctattttttgagcggtgtcactcaccccttttcatcctcctggtaaaacgcgcgtcaggaggagttcacccgcgcggcgacaaggcacactagataaaaaccgctcacaggatctcgcaatgaaactcgctgcgcttgccacgttattcgtgcctgggatggcttttgccgcctggactaccaccgactttcctgcttttaccgaagaagggaccggccgattcatcagccagaaagtggttgagaagggtacacgtcccctgcagctaaattttgaccagcagtgctggcagccttccggcggcattaagctcaaccagatgctgtccatggagccctgtcgcggcacaccgccgcaatggcgcatcttccgccagggtctgtataccctggaggtggatacccgttccggcacgccaacgatgatgatttcgctggaggaaaaagagaccagcgccgcggcgccgcagatccgccagtgtccgaagtgggacggaaaacctctgaccatcgacgtcagcaaaaccttcgccgagggcagcaaggtccgcgatttctacagcggtaatgtcgcgaccgtcagcggcggcaaaatcaccctgcagcccgccttcggcagcaatggcctgctgctgcttgagcgcgccgagacggccgccccggcgccgtttgactggcacaatgccaccgtctacttcgtcctgaccgatcgcttcgtaaacggtaacccggccaacgacaacagctatggtcgccataaagacggcatgcaggagatcggaaccttccacggcggcgacctgcagggattaaccagcaagctggattatctgcagcagatgggagttaacgccctgtggatcagctccccgctcgagcagatccacggctgggtcggcggcggcacgaagggcgatttccctcactacgcctaccacggctattacacccaggactggtcgaaactggacgccaacatggggaccgaagcggatctccgccgactggtggatgaagcgcataagcgcggaatacgtattctgttcgacgtggtgatgaaccatgccggctacgccaccctggccgacatgcaggagttccagttcggctccctgtatctgcaaggagatgagctgaaaaaaactctcggcgagcgctggacggactggaagccgggcgcgggacagacctggcacagctttaacgactatatcaacttcagcgacaaagccgggtgggagaaatggtggggtaagaagtggatccgcaccgatatcggcgattacgacaatccgggctatgacgatctcaccatgtcgctggccttcctgccggacctgaaaaccgaatcgaaggaggtctcaggcctgccgaacttctataaccataaaccagacaccgcagcgaaagcgatcccgggctatacgccgcgcgactatctgacacactggctgagccagtgggtacgtgactacggcatcgatggcttccgcgtcgataccgccaaacatgtggagatggacgcctggcagcagttaaaaacccaggccaccgccgcgctggcggagtggaagaaagccaatccggataaagcgctggatgcggcgccgttctggatgaccggcgaagcctggggacatggagtgatgcagagcgattattatcgccacggttttgatgcgatgatcaatttcgactaccaggaccaggcggcgaaagcggcgacctgtatggccaatattgacctcacctggcagcaaatggcggacaagctgcagagctttaacgtcctgagctacctctcctcgcacgatacgcggctgttccgcgaaggcggcaccaccgcggcggagctactgctgctggcccctggcgccgtgcagattttctatggcgacgaatcatcgcgcccgttcggccccaccggctcggacccgctgcagggtacccgctcggagatgaactggcaggatgtcaacggcaaggcggcccgcagcgttacccactggcagaagatcggccagttccgcgctcgccatccggcaatcggcatgggcaaacagacaacgctgtcgatgccacgtggttacgggttcgtgcgtgagagcggtgaagacaaagtgatggtcatctgggccgggcagcagcagtaatccacatgtggctctccgccctgcggggagccaccattcagaacaaaatgctaacaaaatagcaatatacaggataaagataaaaatccgcctcctcccgccgatttgcaccacgccagcgctggcgttatggttagccactttccagaaccaccgatagactattcgcgatgacattttcccttttcggcgacaaattcacccgtcattcaggcatcacccgcttgatggaagaccttaatgacggtctgcgcacgccgggcgctattatgctgggcggcggcaaccccgctcagatcccggaaatgaatgactacttccagcagctgctggccgacatgctggataatggcaaagcccttgatgcgctttgtaattatgatggtccacagggcaaaagcgagctgctggctctgctggcgaatatgctgcgcgacgagctgggctgggagatcgaaccacagaatattgcgctaacaaacggcagtcagagcgcatttttctacttatttaatctgtttgcaggccgtcgggcagatggcaccacccgtaaggtactgttcccactgacgccggaatatatcggctacgccgatgccggtctggaagaggatctgttcgttgccacccggccgaacatcgaactgctgccggaaggccagtttaagtaccatgttgattttgagcatctgcaggtgacggaagagaccgggatgatctgcgtctcgcgccccaccaacccgaccggcaacgttatcactgatgaagagctgatcaaactggatgcgctggcgaatcagcacggggtcccgctggtgattgataacgcctacggcgtaccgttcccgggcattatctttagcgacgcccgaccgctgtggaatccgaacatcgtgctgtgtatgagcctgtccaagctgggcctgccgggcagccgctgcgggattatcatcgccaacgaaaaaatcatcaccgccatcagcaacatgaacggcattatcagcctcgcccctggcggcatcgggccggcaatgatgtgcgaaatgattaaacgacaggatctgctgcgcctgtcagagacggtgatcaagcccttctattaccagcgggtgcaggaaaccatcgccattattcgccgctatctgccggaggagcgctgccttattcacaaaccggagggggcaatcttcctctggctgtggtttaaggatctgccgatctccaccgagctgctgtatcagcggctgaaaaagcgcggcgtgctgatggtgccgggggattacttcttccctggtctggataaaccgtggccgcacacccaccagtgtatgcgcatgaactatgtaccggacccgcaaaaaatcgaagccggagtgaaaatcctcgccgaagaggtagaatttgcctggcgcgaacaggaagcatagtctcggacgccgcgggcgggtaacgttcgtcagcgaccccattcatgccagcgccagccgctggcgtttttgcgcgcatagcgcttccagctctgcgggaaccatcacccgcagcgcctgcgtcgggcaggcggccacgcaggccggtccttcggcgcggtgatggcatagatcgcatttcaacgcctgcgcctgctggttcattaccgtaacggtcatcgcgccgtacgggcaggccaccatgcagcttttgcagccgatgcagcgccgctggtcgacccaccagacgtcattgtcgcgctgaatcgccccctgtgggcaaacgctggcgcagggcgcatcctcgcactgccgacaggccatcgccgtcgatatgtcaccgcttttcaccacccggatacgcggcgcgaaatggttcgtcgacagggcggcgacatcctgcgcctgctggtgcgccaccgcgcaggccacttcgcaggtacgacagccgatgcaccgctgggcattggcaataagaaactggttcatcctctgctccctggggataaaaccgcagggtgccagaatatcccctgcccgcgctttgatcctgaatggaatcagcgctgttttttgtcagatggcctgcaggatgtggtcatttgcctgacgcttcacgcaccgtgaaacccagctcacgcgaaattgcttcggcggtctcacgtagtggttttaacaagttcttttcgccagctccccggcacgaagtccgccggggagccgacgttaatgattaccggaacaatgccttatcgcgcaggatatgatcgttgccgcgacggcgggtgaagccaatccgatcgaaatactccaggatctggatcgccagcttccgcccgacgtttaaggtatcgcggaaatccgccgcgcaggttgaaccgcgcagccgatccagctcgcgcacccgctgggcgaactgcacaatgcgatcgttgcggtagtaacgatccttgacgatcgcagtaatcatcccctgctgcgccgcctggcgcagcaccgcgcgcatcagggactcttcaacatggacttcgcgcgcaagatcgcgcacccaccacggatcgtcgccgaacagagtctccaccttatgccagaccgcctgctgctcgtcggtaaacccggctttatgctccggcaaatgcagccagccgtgatggctgtggactaagccgctctcgcgcatctgctcaatcagcagcagcaccagcgcttcatcttccatcggcagcgcgatgcggcgcaggcgctcccggccagggcccggctcgtctcgatgctgctcatggtagcgcgcaagggcatccagcaattttcgctgccagcgggcggcaagcggcgcgctaagcaggcgctgtccggcctgcagatagtccggtcgctggatcagggccgccattccggcttcgctgagctgccgcgcccaggcgaagtgctcaagccggacggcatcccgctgcagatgcagctccagcgcctgcgcatcgtcagcgccgaccgctgccagggcgtgcagccactgcagatattccggtttacgtttgccgcggcgcggaggatccagcgtcaccacccgtgcgcccgccagcgtcaagcgagcggagatatcgcggagcaccagccggtcgttatccgccagccacagcggagtatccagcaccagctccgccaggttgtcctcaaggagcgacacccggccggtaatgtggctggcagcatggtgaatatgcagcggctgccactggctgagcggcgtatggcactgcagctcgacaatcacccgttctgctggctccggcggtggtgaggagagcagccagtcgccgcggtgcactgcctctttttgcgcatcgccgacaatgttcagcgcaatgcgctgtccggcgtgcgcctgctcaaccgcttgattctgggcatgcaggccgcggacgcgcatcggcgtgttgacgccggtaagccatagggtatccccgacccgtacttcgccggagagcgccgtcccggtgaccaccagccccgcgcctttgacggtaaaagcgcgatccagcgccaggcgaaaccgctgctgctgcgggcgggggcgctctgcaagctgcagcagatggctgcgcagttccgcaataccgatgttttccgccgccgcggtgggaaagaaagcgacggcgtcaaagcccagctcgcccagggtctgctcgacctctgcctgaacctccgccaccctggcggccgtcacgcggtccgttttggtcagcgccacggtcagcgtcggctttccggtcagctgcaggatcgccaggtgttcgcgggtttgcgccatcaccccgtcatcgcaggccaccaccagcagcgcatggtcaataccgcccacccccgccagcatgttggacaaaaacttttcgtgcccgggaacgtcaataaatcccagcacccgcccgtccggctgcggccagtaggcatagccgagatcgatcgtcattccccgcgctttctcctccggcaaacgatcggcattcacgccggttatcgcctgcagcagcgtcgttttgccgtggtcaacatgtccagcggtggcaataatcatcgtaacaacatctccataaagcgggtttcatcttccagacagcgcaggtccagccagagccgaccgtcataaatgcggccaatcaccggacacggcagcgcgcgccagcgggccgccagcgcctccagccggctaccgcggccgtcatgcggggtaaaggtcaacgccgcgctgggcaggcggtcgacgggtaacgagccgctgccaatctgcgactggcaggctgccacgctgacggcaaaatcagcatagtgtgccgccaggtcaggctgcaggcgttcagccagccggcggatctcctccgccggacgggtgagcaggcgcagcgtcggcaatttctccctcagcgcctccgggtgctgatagaggcgcagcgtagcctccagcgccgcgagggtcattttatcggcgcgcagggcccgcttcagcgggtggctttgcagctgggcaatcagcgcgcgtttgccgacgataatcccggcctgcgggccaccgagcagcttgtcgccggagaaactgaccaggctcaccccggcggcgatcatctcctgcggcatcggctcctttggcaggccatactgactgagatccaccagcgacccgctgcccaggtcggctaccaccggaacatccagttcgcggccaatggccgccagctccgcttcgtcgacggctttggtaaagccctcaatactgtagttgctggtgtggaccttcatcagcagcgcggtattgtcattcaccgcctggcgataatctttggcatgggtgcggttggtggtacccacttcgtgcagctggcaacccgcctggcgcatcacgtcggggatgcgaaatgccccgccgatctccaccagttcgccgcgagagaccaccacttcgcgaccgctggcggtggccgccagcatcagcagaacggccgccgcgttgttgttcacgatacaggcgtcttccgcgccggtgatctggcacagcagatcggcaatggcgcgatcgcgatggccgcgcccggcgtcgtcgagatcatattcgagcgtcaccggcgcgcgcatcgcgctggcgaccgcctccacggccgactccgcctggatggcgcgccccagattggtatgcaataccgtaccggtgagattaaacaccggacgcagggcactccgctggccggcggtgagccgctgctcacaggcgtgctgccagtcatggctccagtcagggagcgtctgccgttggctaatctgttcccgcgcctcatccagcatctggcgcagctgcgccaccacctgcgaatggccgtgctgcgccagcaggggagaaaaagcggggtcgcgtagtaagcggtcaatggccggaagccgggtataaagcgcacgaatttcggtagtcatgaatgggcctggcggtaagttattttcccccctcccgacgggagagggagtcaacaatcagcggcgattgtaacgcctccttgcgcaaactgttacctgcctgggtcaagtccgcggcggttcagtgcgcgcaaagctggcgcgctggaacaacgcatccaccagcttcaccagctgcggccgggtggcgcaccagcccggcgctacgcggcgaaagttcagataagcaatggcgcaggccgtggaaatggtcgccagattaacctcgtcgccgcgcagcgttccgtctgccgcgcaggcttccagcctgtcgagaccgcgagccactttctcccgctggcggagcagttcttgctctgactgttgcgcgcccgggcgagccttttcacgcaccagcgcctgggcggcctccatcacgccatccgccagcgcctctagctggcgcatcctgagagcggctctggggtcggcggggatcatcggcggcgccacgcccagcagctccagatactgggcgatgaccggggagtcaaaccagcactcaccgtcgtccgtcaccagcgccggtaccttgcccagcgggttatagcgcgccacaccgttgctttcgctgtagggggattcgttgacaaactcaaatgggatgcgcttttccagcaggatcaccgatattttgcgcacaaagggactggtgtagctgccgatcagtttcatagcctgctccttatcgccaacaaattatcgccaacaaagatatgagtatggctcagggcaggacaaaaggcaggtgagcgtccggctcaacctgccgccgatcgcattaatgatcgagatagaggtagtgcatccagctggtcatccgcagcagcactttacgcatcaccgagacgtgggtgaaatggtcggagtagaccgctacctgcgcgtagacaccatcgggtaatgctgatagcccttgttcaagcgatcgcgttccgtcgacacgcgggtggtgttggcctggcctcagagagctgcggcttggggacgttaatacagtacagcgtcgttacctggttggcctgcaggcggtcgactcgcgcctgatagggcgccgggtcaatagtaaatagcgcctcgcctttctcgacgcgctgagtggctctatcggttcggctttacgggaattatttatctgattttattcacaatatactaatattcgccccgctattttgagcataattcacgcctttcatttatgccatccggcgtaaaaaagttattcggcaattaaggttgcttagttacagggtcatcccggcgtggaagcaaaaccgggccgagatcacagcggcgtaaacccctcgcgaaattctttgtgatcaaaatcacaaacaaacaacaaaaacacgaaacaaaaatgtgacaaatatcacacaaaaaggcaaatcagcggctaaaaaggcgctgtgttgtttttttacacagtaattttgtgatcatcatcactaaaaaaccctcttagcaccctatattcatgtgatccaaatcacataaaagggcgctggctggacagctaaacgattcagtgccagatttcgcactatcaatcagggcccggctacctctgccgccacattaacaacaaacctcgggctttaagcctgcgcgctacgcaaaacagaagaaggggtgttttatgtcatccgatatcaagatcaaagtgcaaagctttggtcgtttcctcagcaatatggtgatgccgaatatcggcgcgtttatcgcgtggggtatcatcaccgcgcttttcattccgacagggtggttgccaaacgaaacgctggcgaagctggtcggtccgatgatcacctacctgctgccgctgctgatcggttacaccggcggtaaattagtcggcggcgaacgtggtggcgtggtcggggcgatcaccaccatgggcgttatcgtcggcgcggatatgccgatgttcctcggctcaatgattgccggcccgctgggcggctactgcatcaagaagttcgataactgggtagacggtaagatcaaatccggttttgaaatgctggtgaataacttctccgccggcatcatcgggatgatcctcgccattctggccttcctcggcattggcccggcggtcgaagttctgtcgaaaattctggcggctggcgttaactttatggtggcgcacgacatgctaccgctggcgtctatcttcgtcgaaccggcaaaaatcctgttccttaacaacgccatcaaccacggtatcttctcgccgctgggtattcagcagtcccacgagctgggtaaatccatcttcttcctgattgaagctaacccgggtccagggatgggcgttctgctggcgtacatgttctttggccgcggcagcgcaaaacagtctgcaggcggggctgctatcatccacttcctgggtggtatccatgaaatctacttcccgtacgtactgatgaacccgcgcctgatcctggccgttatcctcggcgggatgaccggtgtcttcaccctgactatcctcaatggcggtctggtttccccggcttccccaggctctatcctggcggtactggcgatgacgccgaaaggcgcctacttcgctaacatcgccgcgattatcgcagcgatggcggtctccttcgtggtctctgcggttctgctcaagaccagcaaagttaaagaagaagacgatatcgaagccgcaacgcgtcgtatgcatgacatgaaagcggaatccaaaggcgccagcccgctggcggccggtaatgtcaccaacgacctgagccatgtgcgtaaaatcatcgtcgcctgcgacgccgggatgggttccagcgctatgggcgccggggtactgcgcaagaaagtgcaggatgccgggctgagcaacatctcggtcaccaacagcgcaatcaataacctgccgccggatgttgacctggtcatcacccaccgcgaccttaccgagcgcgccatgcgccaggtgccgcaggcgcagcatatttcgctgaccaacttcctcgacagcggtctgtacaccagcctgaccgagcgcctggtcgcggcccagcgccacatcgacaacgaagtcaaagtcaccgatagcctgaaagacagctttgacgatactaacaacaacctgttccagctgggcgcggataacatcttcctcggtcgcaaagcagccaccaaagaagaagcgattcgcttcgccggtgagcagctggtgaaaggcggttacgttgagccggaatatgtgcaggcgatgctggaccgcgaaaaactgacctcgacctatctcggcgagtccattgcggtaccgcacggcaccatcgaagcgaaggaccgcgtgctgaaaaccggcgtcgtcttctgccagtacccggaaggcgtgcgcttcggtgaagaagaagatgaagtcgcgcgtctggtcatcggcatcgccgctcgtaataacgagcacattcaggttatcaccagtctgactaacgccctggatgacgaaaccgtgattgagcgcctggcgaaaaccaccagcgtcgacgaagttctggcactgttaaataaataatcagcgctatccaaccctctcctttgggagagggttggggtgaggggaaaggcctcaccccagccctctcaggtgaaaacattaattgaaggttaatactatgaaagcattacattttggcgcaggtaatatcggacgtggctttatcggtaaattgctggccgacgcgggcatcgaactgacgtttgccgatgtcaatcagaccgtacttgatgccctgaatgcccgtcatagctatcaggttcacgtcgtcggtgagaatgagcaggtggacaccgtctccggcgtcaatgccgtcagcagcatcggcgatgaggttgtggacctgatcgctgaagtggatctggtcaccaccgccgtcggtcccgtcgtgctcgagcgcatcgcgccagcgatcgccaaagggctggcgcagcgcaaagcgcagggcaccgaacgccccctgaacatcatcgcctgcgaaaatatggtgcgcggcaccacgcagttaaaaggccacgtgtttaacgcgctggcggaagaacataaagcctgggtggaagcgcatatcggctttgtcgactctgccgttgaccgtattgtgccgccatcggcttccgccactcatgacccgctggaagtcaccgtggaaacctttagcgaatggattgtcgataagactcagttcaagggcgcgctgccgactatcccggggatggaattaactgataacctgatggcatttgtcgaacgcaagctcttcaccttgaacaccgggcatgctataaccgcctacctcggaaaactggcgggccatcagacgattcgcgacgcgatcctcgacgagaaaattcgtgccgtcgtgcagggcgcgatggaagagagcggcgcggtgctgatcaaacgttacgcctttgacccgcagaagcacgcggcttatatccagaaaatacttggccgtttcgagaacccgtacctgaaagacgatgttgagcgcgttggccgtcagccgctgcgcaaactgagcgctggcgaccgtttaattaagccgctgctgggtacactggaatacgggctgccgcaccgcaacctggtgaaagggattgcggcggcgatgcatttccgtagcgaagacgatccgcaggcgcaggagctggcggcactgatcgccgacaaggggccgcaggccgcgctggcgcagatttccggcctggatgccgcaagtgatgtcgtcgcggaggccgttaacgactacaacgcggaaaaatgatgcacaacctggcgcggccgacgtcgcgcccattacgactcctgtcagatatgcaggcaatgatggaagaaacacaagcatttgaaaaccgtgtgcttgagcgtctgaatgctggcaaaaccgtacgaagcttcctgatcgccaccgtcgagctgttaacggaagcggtcaatattctggtgcttcaggtgttccgtaaagacgactacgcggtgaaatacgccgtcgagcccttgctggagggcagcgggccgctcggcgatctctctgtacgcctgaagctgatttatggccttggggtgataagtcgtgccgaatatgaagacgctgagctgctgatggccctgcgcgaagagcttaaccacgacggcaatgagtacagctttaccgacgacgaaattatcggtccgttcggcgagctgcactgcgtcgccgccctgccgccaacgccgcaatttgatgacagcgatgccgaactgctggcaatgcagaaactgcgttaccagcagatggtgcgctcaacgatggtgctgtccctgactgagctgatttcacgaatcagcttaaaaaaagcctttcagaaatcaacgctctgattccggttccgtctggtcgcaggtcggccggtaaagctgacgataatattccagacgctgcaggaacaacgcttccttatcctgaggaatgtctcgcggtacatgctgcagacgcggagactttttcaaatactccataaacgcctgactggaagccataaaatcaaccgctttgtcgattaaacgtggtacgccgtcgccgatctttgccatcacgtcctccttttgggaataatctgattaagcattagccaattcaccagcgtgggttaaggaaaacgtgcttatctgccgacaggcttcacagaaatgaaattagaacgggtattaggcggaatattaataaaattcaaattattagcgataaatgatattgcattccgcgggcgacaaacggcgaatttttgataaatagctatcaacaatagcggtcacggcacatactataggcgaatgaagcccctttattaacagatcaaatcaccatgaaagaagtcgaaaagaatgaaatcaagcgtctgagcgatcgtctcgacgccatccgccaccagcaggccgagctgtcgctggtggaagccgccgataaatatgctgaactggaaaaagaaaaagccactctggaaacggagattgaacgtctgcgttccgtccagagccagaagctgagcaaagaggcgcagaaactgatgagcctgccgttccgccgcgcgattaccaaaaaagagcaggccgatatgggcaagctgaagaaaagcgttcgcggcctggtggttgtccatccgatgaccgccctgggccgggaaatgggtctgaaagagatgaccggtttcgcccgcagcgaattttgatccccagccctctccgtacggagagggctattctgtcttcactcccccacatttttaccttcagccgggtcgattggtccaaccaataatttcatccaccccctggcagttcacaaatccgtcaaaacccatcacaaacacgttgcttaagagtaacatctgattaaccattcattgtcatcaaccctgatacccttaattggccgggccaattttacttttggtgggatcggcaatgagcgcagactcagccctcctctcctggcggcccgatggagaccctgcatgaatctctggcaacaaaactacgatcccgccggtaatatctggctatccagtcttatcgcatcgctaccgattctgtttttcttttttgcgctgattaagctcaaactgaaaggctacatcgctgccacctggaccgtcgcaatcgcgctggtcgttgccttactgttctataaaatgccggtggaccgcgccttagcctcggtggtctacggcttcttctacggcctgtggcctatcgcgtggattattatcgccgcggtcttcgtctataaaatctcggtgaagaccggacagttcgacatcatccgctcatcgattctgtcgattacgccggaccagcgcctgcagatgctgatcgtcggcttctcgttcggcgcctttctcgaaggggcggcgggtttcggcgcaccggtggcgattaccgccgcgctgctggttggtctcgggtttaacccgctgtatgcggctggcctgtgcctgatcgtcaacaccgcgccggtggccttcggcgcgatgggcatcccgattctggtcgccggccaggtgaccggtatcgatagcttcgccatcggccagatggtgggccgccagctgccgttcctgaccattatcgtgctgttctggatcatggcgattatggacggctggcgcggcattaaagagacctggccggcggtgatagtcgcaggcggttcgttcgctattgcccagtacctcagctctaacttccttggcccggagctgccggatatcatctcgtcgctggtctccctggtctgtctgaccctgttcctcaaacgctggcagccggtacgcatcttccgcttcggcgatctcggcgcctcgcaggtggatatgacgctggcccgcacacgctacacggcgggacaagtgatccgcgcctggtcgccgttcctgttcctgaccgccaccgtgaccctgtggagcgtgccgccattcaaagcgctgttcgctcctggcggcgcgatgtatgacttcgttatcaatatttcggtaccattcctcgacaaaatggttgcccgtatgccgccggtggttagcgccgcgacgccctacgccgcggtgtataaattcgactggctgtcggcaaccggcaccgccattctgttcgccgccctgctgtccatcgtctggctgcgcatgaagccgaaagatgcgctgaccaccttcgccgggacgctgaaggatctggcgctgccgatctactctatcggcatggtgctggcgttcgcctttatctctaactattccgggctgtcgtcgaccctggccctggcgctggcccataccggccacgcgtttaccttcttctcgccgttccttggctggctgggggtattcctgaccggttcggacacctcgtctaacgccctgttcgccgcgctgcaggcaacggcggcgcagcagattggcgtctccgatattctgctggtcgcggccaataccaccggcggcgttaccggcaagatgatttccccgcagtcgatcgccatcgcctgcgccgcggtaggcctggtgggcaaagagtcggatctgttccgctttaccgtcaaacatagcctgatcttcacctgcatggtggggctgatcaccacgctgcaggcctacgttttaacctggatgatcccgtgatagtgatgcctaaacgcctggccgacgacgtggcgcgtcgcgtccgggcgctgattgaagaacaacagctggaggcgggcatgcgactgcccgccgagcgccagctcgccgcccagctcggcgtctcacgcaattccctgcgcgaagcgctggcgatgctggtcaatgaaggggtgctgttgagccgtcgcggcggcggcaccttcgtccgctttcagcatgagccgtggtcagagcaaaacatcgtccagccgctgaagacgctgctggccgatgacccggactacagcttcgatatcctcgaagctcgccacgccatcgaagccagcaccgcgtggcacgcggcgatgcgcgccaccgacgccgataaagaaaaaattcgtctgtgctttgaagcgacccagagtgaagacccggatatcgcctcgcaggcggatgtccgctttcacctggcgatcgccgaagcctcgcataacgtggtgctcctgcaaaccatgcgcggctttttcgacctgctgcactcctccgttaagcagagccgccagcgcatgtatcaggtgccgccggtgtttgcccgcctgaccgaacagcaccaggccgtcatggaggcgattgtcgccggcgacgccgaggcggcgcgccaggcgatgatgggccacttaggctttgtccacgccaccatcaaacgttttgatgaagaccaggcccgccaggcgcgaattacccgcctgcccggtgaccacaatgaaaattccagggagaactcgtgatgattatttccgccgccagcgactatcgcgccgccgcacagcgtatcctgccgccgtttctgttccactatattgacggcggcgcctacgccgaacataccctgcgccgcaacgtcgaggacctttccgatgtagccttgcgccagcgtattttgcgcaatatgtcggacctgagtctggaaacgacgttattcaacgagaagctggcgatgccgacggcgttggcgccggtcgggctgtgcgggatgtacgcccgccgcggcgaagtgcaggccgccggcgcggcggacgacaaaggcattccgttcaccctctctaccgtttccgtctgcccgatcgaagaggtcgccccgaccatcaagcgcccgatgtggttccagctgtatgtcctgcgcgaccgcggctttatgcgcaatgcgctggagcgcgccaaagccgccggctgctcgacgctggtctttaccgtcgatatgccgactcccggcgcccgctaccgcgacgcccattccggcatgagcggcccgaacgccgccctgcgccgctactggcaggccgtcacccatccgcagtgggcgtgggacgtcggccttaacggtcgcccgcacgatctgggcaatatctccgcctatctcggcaaaccgaccgggcttgaggattacattggctggctggcgaataacttcgatccgtcgatttcatggaaagacctggagtggatccgcgatttctgggacggtccgatggtgatcaaagggatcctcgatccggaggacgcccgcgacgcggtgcgcttcggcgctgacggcattgtcgtctccaaccacggcggccgccagctcgatggcgtgctctcctcggcccgcgccctgccggcaattgccgacgcggtgaaaggcgacatcactattctcgcagacagcggcatccgcaacgggctcgacgtggtgcggatgatcgccctgggcgccgacagcgtactgctgggccgcgcttacctgtacgccctggcgacccacggtaagcagggcgtggcgaatctgctgaacctcatcgagaaagagatgaaagtggcgatgaccctcaccggggcgaaaagtatccgtgaaatcagccgtgattcgctggtgcagaacgccgaagcgctgcagaccttcgatgcgctgaagcagaataacgccgcgtaattctccacgttttcccttacgccgcccctctccctcagggtgagggttcaacaaatatctgctattctgccccccgcaattaagggggcagtatgctgaacatcgtgttattcgaaccagagatcccgccgaacaccgggaatattatccgcctgtgcgccaacacgggcttcagtctgcatatcattgagccgatgggcttcacctgggacgataaacgcctgagacgcgccggactggactatcacgagttcactgccgtgcagcgccatgcggattacgcggcgtttgtcgccagcgcgcagccgcagcgtctgttcgccctaaccaccaaaggcacgcctgcgcacagcgcagtgagctatcaggacggcgatttcttgatgtttggcccggaaacccgcggtctgccggccagcatcctcgatgccctgccgccggagcagaaaatccgtattccgatgatgccggacagccgcagtatgaacctgtcaaacgcggtgtcggtggtggtgtatgaagcctggcgccagctggggtatcctggcgcggtcttgcgcagctaacctgagcggttcccggattgcagcgcaaggagccttatccgggcgacaggctggcgggatgagatcgtaggcccggtaagcgcagcgccaccgggcaagacgttaaatcccgtcgccgtactcgaaagtgtggtgaataccgttgaaatgctgatccatatccatcgccggcttatcgctctccggcttgccgacgatgcgcgcaggaacacctgcggcggtggtatgcggcggcaccggctgcagcaccactgagcctgcgccgatttttgccccacgcccgacttcgatattgccgaggatcttcgctccggcgccaatcatcacgccttcgcgaattttcgggtgacggtcgccgctggttttaccggtaccgccgagggtgaccgactgcagaatagagacgtcatcctcaatcaccgccgtttcaccaaccacaatgccggtggcgtggtcgagcatgatcccgcggccgattttcgccgccgggtggatatccacctggaaagagacggagacctgattttgcaggaaaatcgccagcgcgcgtcgcccctgagtccacagccagtggccgatacgataggcctgcagggcatggaaacccttcagatagagcaacggcgtggagtatttatccaccgccgggtcgcgcgtgcgcaccgcctgaatatcgcaggcggcggaggcgatcatttccggatcggcggcgtaggcctcttccaccacttcgcgaatggcgatcgccggcataatcggggaagccagcttgttggccagcatatagctcagcgcgctgccgagattttcatgcttgagtagcgttgcgtgataaaaactggcgagcatcggctcacagtcagccaaagcccgggcttcggctttaatattattccagacgatatccagttcttcacacggcattgcatactccaggcgatatagtaatgacctgccagttctgcgctggcagggtcattcaggtgacaaaggaaagctaattgctgctgcgctcgtccttgcgggcgcgacccaataaggtcaatgctgcctcgcgcgcaatttttccgcaatacaatacctgataaatttcctcggttattggcatttcgacacctaaacgctgtgccagaacgcgaacttccttggtattgcggtagccttcaaccacctggccaatcttgtcctgggcgctctgcacgtccataccctggccgagcatcatgccgaagcgacggttacgggactggttgtcggtgcaggtgagcaccaggtcaccgaggccggccatgcccataaaggtttccggatcggcgcccagcgccgcgccgaggcgggacatttccaccagcccacgggtaatcagcgccgtacgcgcattggcgccgaagccgatgccatccgacatacctgccccgatggcaatgacgtttttcaccgcgccgccgagctgcacgccgataaagtccgggttgatgtagacgcggaagcttttgccgcagtgcagtaggcgctgaaggtcttccgcaaactgcggatccgtggccgccagcgaaatcgccgtcggcaggccggcggccagctctttggcgaaggttggccccgagatcaccgccagcggaatatcatcgcccagcgcttcacgcgccacgtcctgcagcagacggccggtttcggcctccaggcctttggtggcccacaccagccgcgcgtcggaacgcatcaacggtttaatctggcgtaacacctgaccgaatacatggctcggcaccacgacaaggatgtcgcggctggcggccagcgcggtggccaggtcgctctcaagatgcagcgtatccgggaaaggcacatcgggaaggaacgcggcgttgcagcgatcgtgttgcagcgtcgcgatatgtttcgggtcatggccccacagcacaacgtggtggccatttcttgccagggtgatggcaagagcggtgccgtaagagccggcaccgatcacagtcattgcagcattaagtgcgttcatcaggcatcctgatgttgttcagcaccttcgccagcctgctgctgcagatagttcatgaacagcgcgtcgaagttcactggcgcaaggttaagttgcgggaaggttccgcgggaaaccaggctggtgatgcactcgcgcgcgtacgggaacagaatgttcgggcagtatgcgccgaggcagtgcgccatctgggtgccttcgatgccgtcgatggagaaaataccgccctgctgtacttcacagaggaacgcggtttcttcgcccagcgcagcggtcacggtcacacgcagcaccacttcataaacgccttcagccagctgggtggaggcggtatccagatcaagtttaacttccggctgccagtctttctggaaaacttgcggcgcgttcggcgcttcaaaagagatatctttggtatagatacgctggatctggaaggtcatttcggtgctgttttgttctgacatagtaaaaccctttcgtgttgtccttaaatacgcgcttccgccagggaaagcgcgcaaaaattagcgcaagaggggatcaagtccaccacgtgaatcaagcgcatacaagtcgtcacagccgccaatgtgctgcgcatcaataaaaatctgcggaaccgtcgtccgtccgctgcgctggatcatctcctcacgcttcgcggcatcgccatcgatcggcaactcatggaacgttacgcctttgctgttcagcagcgctttcgcgcggatgcagaacgggcaggtcgctttggtgtagatctcaatattggccatgacttcactcctgttgttaccctgagggttttacgccgcagcctgtgttcccttcacgtcaggcgtgaaggagaaaacgcggcggcatcaccacgcgaggtaagttatttgccgcgtaccagagggaggttttcgccgctccagccagcaatgccctctttcagtacaaagactttttcaaacccggctttgttcagcgcgctggcgggctcttgcgcctgcatgccggaaccgtctaccacaataatgggttgcgatttgtgtttttccaactcgccgacgttattggctttgatatcgctgggcagcaggttaatagcgccggcaatatggcctttacggaaatcgtcacgctgacgcaggtcgaccaccaccgcatcttctttattgataagacgcgtcgcttcaccacgggtgatgactttaactttcgacatcagccccttgaaggtggtgaacactaccgcacccagcagcgcgatccacgcgatgctcaggaccgggtgacggccgatgaattgcataatttcttgcatggggggttacaactcccgactaagtgagaaaaaaaccaggaaaggagtatacctgtgccttgcggcaattacagccagtgagcgcgatgtaatgtattttctgcgggcggtggcgaaaaaaagccgctctcgctgacccggcgcggcccggccgctccctttctttgatctttcacggggatttaaacgattcagctgtagtaaaattacgcaaaatttctgtctttgagcatgaggttgtcgcaatgtcggtttctaaaaaacctatggtactggtgattctggatggctacggctatcgcgaagaccaacaggataacgccatttatagcgctaaaacgccggtaatggacgcgctgtgggccaaacgtccacataccctgatcgatgcatccggcctcgaagtcggcctgccggaccgtcagatggggaactccgaagtaggccacgtcaacctgggcgccggtcgtatcgtctatcaggacctgacccgtctcgatgtggaaattaaagaacgcaccttcttcgccaacccggtactgaccgccgcggtcgataaagcggttgccgccggcaaagcagtacatatcatgggcctgatgtcgccaggcggcgtccacagccacgaagatcacatcatggcgatggtggagctggcggcagagcgcggcgctgagaagatctacctgcacgccttcctcgacggccgtgatacgccgccgcgcagtgcggaaaaaacgctggcgacattcgaagccaaatttgccgcgctgggcaaaggtcgcatcgcatcgctcatcggccgctattacgccatggaccgcgacaaccgctgggatcgcgtagaacaagcttatgatctgctgaccctggccaaaggcgaattccaggccgataccgccgtcgcaggtctgcaggccgcctacgcccgtgacgaaaacgacgaattcgtgaaagccaccgttatccgcgccgccggccaggccgatgccgcgatggaagacggcgacgcgctgatcttcatgaacttccgtgccgaccgcgcgcgtgaaatcacccgcgccttcgtcaacgccgacttcgacggctttgcgcgtaagaaagtggttaatctcgatttcgtgatgctcaccgaatacgccgccgacatcaaagtcgcctgcgcctatccgcccgcctcgctggccaataccttcggcgagtggatggcgaagcacgataaaacccagctgcgcatctccgaaactgaaaaatacgctcacgtcaccttcttcttcaacggcggcgtagaagagccgtttaaaggcgaagagcggatcctgattaactcgccgaaagtggcgacctacgatctgcagccggaaatgagctccgccgagctgaccgagaaactggtcgccgccatcaaaggcggaaaatacgataccatcatctgtaactacccgaacggcgatatggttggccataccggggtgatggaagcagccgtaaaagcggttgaagcgctggatcgctgcatcgaccaggtggctcaggcggtggaatccgttggcggccagctgctgatcaccgccgaccacggcaacgccgagcagatgcgcgacccggccaccggccaggcgcacaccgcccataccaatctgccggttccgctgatctacgtcggtaataaagcggtcaaagcggtcaacggcggcaaactttccgacatcgccccgaccatgctgtcgctgatgggaatggaaatcccgcaagagatgactggcaagccgctgttcatcgtggaataatccttccccatgaggggaaaggcgatgtattcaactacatggatcgcagcggcagttcgatccgtcctttacgccagcgcgctcagcgctggcgtattgctgtgcgcgtcatctgcgcatgccgacgatcgcgatcagctaaagtccatccaggccgacatcgccgccaggcagcgggcgattaagcaacagcagcagcagcgcgcaagcctgctcgcccagctcaaagcgcaggaagaggcgatcgccgccgcggcccgcaaactgcgcgaaacccaggatagcctgaaccagctcaataagcagattgacgagatgaacgccgctctcgcgaagctggagcgccagcgcgcgtctcaggagcggaacctcgccgcgcagctcgatgccgctttccgccaggggccgcataccggcatccagatggtgctcagcggtgaagagggccagcgcaatcagcggatgcaggtctatttcagctatttcaaccaggcccgccaggagactatcgcggagttgaagaaaacgcgcgaagagatggcggtgcaaaagtcgatgctcgaagaaaaacagagccagcagcaaacgctggtctacgagcaaaaggcccagcaggcgaagctggagcaggcgcgtaacgaacggaaaaagaccctttccggcctggagtcttccattcagcagggtcagcaacaattaagtgaattacgggctaacgaatcgcgcctacgcggtcgtatcgcccaggcggaggctgccgccaaagcccgcgccgatcgggaagcacgcgacgcgcaggcggtgcgcgaccgccagcaggaagcatcgcgcaaaggcactacctataaaccaacggaaagtgagcgttcgctgatgtcacgcaccggcgggctgggctcgccgcgcggtcaggcgttctggccggttcgcggtccgctccttcatcgatatggcgaacagctgcaaggtgaactacgttggaaagggatggttatcgccgcgtctgaaggcaccgaagtcagagccattgccgatggtcgggtcattctggccgactggctgcagggctatggtctggtggtggtggtcgaacatggcaaaggcgacatgagcctgtatggctataaccaaagcgcgctggtcagcgttggtacccaggtgcgtgccggccagcctatcgcgctcgtaggcagcagcggcggtcagggccgtccgtcgctctatttcgaaattcgccgccagggtcaggcggtcaatccacagccgtggttgggaagataagttttgcttcaatttcgcgcaattgctcttgccgtagccggttcgctggctctggcggcgccagcgttcgctggcaaactctccatcgttattgacgattttggctaccgcccgcagaccgaaaatcaggtgctggcgctgccgtccactatctccgtcgccgtgctgccgaacgcgccgcacgcccgggaaatggccacgaaagcgcataatctgggccatgaagtgctcatccacctgccgatggcgccgctcagcaaacagccgctggaaaaagacaccctgcgtcccgaaatgagcagcgaggagatcgagcgcattattcgcgaggcttacggcaaagtcccttacgccgtcgggctgaataaccatatgggcagcgcgatgacctccaacctgtttggcatgcagaaggtgatgcaggccctggagcgctacaatctctattttctcgacagcgtcaccatcggcaacacccaggccatgcgcgccgcgcagggtaccggcgtgaaggtgattaagcgcaaggtgtttctcgacgatacgcagaatgaagccgatatccgcaaccagttcaatcgcgccatcgccctggcgcggcgcaacggttcggcgatagccattggccatccgcatccgacgacggtgcgggtgctgcagcagatggtctataacctgccgccggatatcacgctggtgcgcccgagcagcctgctgaacgagccgcaggtcgacaactcgacgccaaactacgcccagccgcccgcgcaacaaacgcagcagaagccgcgtaatccgttccatggcgtgaagtcttgcaaaccgaagcgcccgctggagcctgtgaacgccagccgcttcttcactatcctcagcgatagcatcagccagagcgcgctgatccagtactatcgcctcaaatggcagggctgggacaatcccggcaactagaccactcaggggtccgttcgcttttgcgcgacgggcgcctggttatcttcgtgggcgtaccacgccttaaaatatttcagaaagctgtaaaacgtcgcgtacaggccggtcaccacgccgaccttgccatagcgccacgctccgctaaacagataccacttaaagaaagcgccaatggcgctgacgatcccccgcgtcagcgaaggtttgatctgctggtacttcaccagccgggtggtatagctgttcagcttattaaacacttcatgcagcgaataaaaggtatcgtggcgaacaaagcccggcagcctgacggagctcgcgtgtccgaccacctggtcatccaccggccgatcgttaaaccgcgcctgctggcggttaaagagccgcaccggataatccggtgaggaaatggggtagatcgtccgtacctgtttgcctagcacaaaccagtagcgcggcagacgccaggcgcaggtcggctcaggctcctcccccgcttttagcgcctgaatggccgccaccacgtcattatcaagaatttcgtcgctgtccatgcacagcacccagtcatggctggccagtccgatggcatagttcatctgcgcgccgtgggctttataggcatggtgatggacggtgagaccaaactgctggcaaatagcgacggtttcgtcggtactgccggagtcgacgacgatacattcatcggcaaccttcagcagaggcggcagcacctccatcagcaggcgcgcagagttacaggtcagtaagcatacggagagtttaagcatgatagttacaaagttaaactgcgactaaacacactgtataagcgaataaccgtaaaatcgatgtagaaattgtgcgcttaatattaagcaggctaaaaatgttatccaaatctaaattaaggcgcccgcaggcgccttttttgctgatttttacgccagcatgggggattagtcccagctcaaaaccactttaccggactggccggagcgcatcgcgtcaaaacctttctggaagtcatcaatgccgaagcggtgggtgatgatcggtgagagatccagaccagactggatcagcgccgccatcttgtaccaggtttcgaacatttcgcgaccatagatacctttgataaacagccctttgaagatgaccttggtccagtcgatggacatatccgacggcgggatacccagcatcgcgatacggccgccgtggttcatggtatcaagcatgctgcgaaacgccggcggcgcgccggacatctccagacccacatcgaaaccttcggtcatccccagctcggccatcacgtcattaaggttctctttggccacgttcaccgcgcgggtaacgcccattttgcgcgccagctcaagacggtactcgttgacgtcggtgatcaccacgttacgcgcgccgacgtgtttcgctaccgccgccgccatcacgccgatcggaccggcgccggaaaccagcacgtcttccccgaccagatcgaaggagagcgcggtgtgcaccgcgttgccgaacgggtcgaagatagacgccaggtcatcagagatattgtcggggattttaaaggcgttaaaggccgggatcaccagatactcagcaaagcagcccgggcggttgacgcccacgccgatggtgttgcggcacagatgggtgcggcccgcgcggcagttacggcagtggccgcaggtgatatgcccttcgccggagacgcggtcgccaatcttaaagccgcgcacttcctgaccaatccccaccacttcgccgacatattcgtgaccgaccaccatcggcaccggaatggtcttctgcgaccactcatcccagttgtagatgtgcacgtcggtcccgcaaatggcggtcttgcggattttaatcagcagatcgttatggccgacttccggttccggtacgtcggtcatccagatgccttcttccgctttcagtttggataacgctttcatctcatacccttattaggcgatgacgcccagttgtttgccgatgcgggtaaaggcttccaccgcacgctcaatttgttcaggagtatgcgccgccgacatctgggtgcgaatacgcgcctggcctttcggtaccaccggatagaagaagccggtgacatagatcccttctttctgcagctcgcgggcaaagttctgcgccaccaccgcctcgcccagcatcaccggaatgatggcgtggtcggcgccggccagcgtgaagcctgccgcggtcattttttcgcggaacagacgcgcgttagcccacaggcgatcgcgcaggtctgccccctcttcaaccatctccagcactttgatggaggcggccacgatggccggcgccagagagttggagaacagatacggacgggagcgctggcgcagccactcaaccacctctttgcgcgcggcggtgtagccgccggaggcgccgcccagcgctttacccaacgtgccggtgatgatatcgacgcgccccatcacatcgcagtattcgtgggagccgcggccgttttcgccgacgaagccgacggcgtgggagtcatcgaccatcaccagcgcatcgtatttatccgccaggtcgcaaacgccttgcaggttggcgatcacgccatccatcgagaacacgccgtcggtggcgatcagcacgtgacgcgcgccggcctcgcgagcttctttcagacgcgcctccagctcttgcatatcgttgttggcatagcggaagcgcttcgctttacacagacgcacgccgtcgatgatcgaggcatggttcagggcgtcggagataatggcgtcttccgggccgagcagcgtttcaaacaggccgccgttggcgtcgaaacaggaggagtagaggatcgcgtcttccataccgaggaaatcggccagcttcttctccagctgcttatgcgtatcctgggtgccgcagatgaagcgtaccgaggccatcccgaaaccgtggctgtccatgccggatttcgccgcggcaatcagttccgggtggttcgccagacccagatagttattggcgcagaagttaatcacgtggctgtcgccgacggtaatgtccgcctgctgcgccgaggtgatgatgcgctcttctttgaacaacccttcggcccgagcggtctccagattgctagttaactgtttgtagaaatcaccacgcattgcaactctccagattcggcaaaatttggcacatattacccaaagctatacgctgatacgagatgatgcaggcctgaatgaattatttgcagcataaatcacgtcagcccagcaccttattctgcgaatggctgtaggcttgctcatgtggtgatatgataagagcattcatgtccggattgtctccgggctctcaacttcaaaggtacagttatgatcatcgttaccggcggcgcaggctttatcggcagcaacatcgttaaagcgctgaatgacaaaggcatcaccgacattctggttgtcgacaatctgaaagacggcaccaagtttgtaaacctggttgacctgaacatcgctgactacatggataaagaagactttctgatccagattatggcgggtgaagagttcggtgaaatcgaagcaatcttccacgaaggcgcgtgctcttccactaccgagtgggatggtaagtacatgatggacaacaactatcagtactccaaagagctgctgcactactgcctggagcgcgaaatcccgttcctgtacgcctcctccgcggccacctatggcggacgcaccagcgacttcatcgagtcccgcgagtacgaacagccgctgaacgtttacggctactccaaattcctgttcgacgaatacgtccgccagatcctgccggaagccaattcgcagatcgtcggcttccgctacttcaacgtctacgggccgcgcgaaggccacaaaggcagcatggcgagcgtcgctttccacctcaatacccagctgaataatggcgaaagcccgaaactgttcgaaggcagcgacggcttcaagcgcgacttcgtctacgtgggcgacgtggctgacgtcaacctgtggttctgggaaaacggcgtttccggcatctttaacctcggcaccggccgtgcggaatccttccaggccgtcgccgatgcgaccctggcataccacaaaaaaggcagcatcgagtacatcccgttcccggacaaactgaaaggccgctaccaggcgttcactcaggcggatctgactaacctgcgcaaagcgggctatgacaaaccgttcaaaaccgttgccgaaggcgtaacggaatatatggcctggctaaaccgcgacgcgtaagaaacaagcatgaaaatattggtggtaggcccgtcttgggtgggcgacatgatgatgtcgcaaagtctttatcgtacgctcagggcgcgctatccccaggcgattatcgacgtgatggcgccagcctggtgccgtccgttgctttcgcgcatgccggaagtgaacgaagcgatcccgatgccgctgggtcacggcgcgctggctatcggcgaacgccgtaagctcggccacagcctgcgcgaacgtcgctacgatcgcgcttacgtgctgccgaactcgtttaaatcggcattagtccctttctttgccaatatcccgctgcgcaccggctggcgcggcgagatgcgctacggcctgctcaacgacgcccgggtgctggacaaagacgcctggccgctgatggtggaacgctacgtggcgctggcctacgacaacggcgtgatgcgctgcgccaaagatctgccgcagccgctgctgtggccgcagctgcaggtcaacgaaggggaaaagtcgcaggcctgcagcgcctttaacctgtccaacgatcggccgatcgtcggcttctgccccggcgcggagttcggcccggccaaacgctggccgcactatcactatgctgcgctggcgaaaaagcttatcgacgatggctatcagattgcgcttttcggctcggcgaaagataacgaggccggcaaagagatcatcgccgccctcagcagcgagcagcaggcctggtgccgtaatctggcgggtgaaacccagctggagcaggcggtcattctgatcgccgcctgtaaagctgtagtgactaacgattcggggctgatgcacgtcgccgcagcgctggaccgcccgctggtggcgctgtatggcccgagcagtccggactttaccccgccgctgtcgcataaagcgcgggttatccgtctgattaccggctaccacaaggtgcgcaaaggcgatgccgccgaaggctatcatcagagcctgatcgacatcaccccagaacgcgtcctgcaagagctgaacgaactattagcggaaaaaaccgagcacgaggaagcgtaacggatgcgggtattgatcgttaaaacctcctccatgggcgacgtgctgcacacgctgcccgcgctaaccgacgccgcgcaggctatccccggcatccgcttcgactgggtggttgaagagggtttcgcgcagatcccctcctggcatgaaagcgtcgagcgggtgatcccggtggcgatccgccgctggcgcaaagcctggttctccgcgccgatcaaagccgagcgtcaagcctttcgcgaggccgttcaggcggtaaagtatgacgccatcatcgatgcccaagggctggtaaaaagcgccgcgctggttactcgcctggcgcacggcgtcaagcacggtatggactggcaaacggcccgcgagccgctggcgagcctgttttacaaccgccgccaccatatcgcgaaacagcagcacgcggtggagcgtacccgtgagctgttcgccaaaagccttggctacgcgaaaccccagacccagggggattacgccattgcgcgccatttcctgcagcacgaggctagcgctgccgcgccctatctggtgtttctgcacgccaccacccgcgacgataagcactggccggaaacccgctggcaggagcttctcgatctgctggccgacagcggcgtccacattaagctgccgtggggggccccgcacgaagaggcgcgggcgaagcggctggcggaaggccgggagtatgttgaagtgctgccgcgcatgagccttgagcaggtggcgcaggttctggccggcgcccgggccgtcgtctcggtcgataccgggctgagccatctgaccgccgcgctggataaaccgaactttacgctctacggcccgaccgacccggggctgattggcggatacggtaaaaaccagcatatcgtgcggccggaaaacagcgccagcaccggcgatattgcggccagccggattcatcttctcctgcaaaatcaggggctgctctgatgggatccctgtttaagcagatctaccgctatacgcgccctcgcgcgtatcgccacaatgaaaatctgtggccttttacccgtattacgcgcgcgccaagcggcgaaatcagcgcgttacgctataaagggaaaacggtgccgctggtcagcctgagcgcgctgaaaaacagtatgcagggcgaagtcctgctgaccgccaccggcccctcaacccgcaatatcgatttttccctgttgtcgaaaacgatcccggtgatgggcgtcaatggcgcctggcatcttgccgaccggctgcacttttcgctctataccatcgtcgacatggaatttttcgataagaagccggacattatccgcgccattgtcagccagccggatattttgctgttcaccaccatgcacgggatcgccaaaatcgtcgatcgctatggggacgcgctgcgctgccgtttggcgttgattgaggacggttgctataagatttaccagccgaaagtcgccagcgaagcgataaagcgcacttaccagcagaatgcggcgatgtgctttcatcctcagcgcccggatatctgttttagcaccgatattcgccagggcatctttgatgccggcacggtggtctactgggcgctgcaaattctcgcctggctgggcttcaatactatcctggtgagcggcctggatatgaccaactttaaccagccgcgattctacgaaacacaacaagaaaaattgccttcttacctggcaacaaaagtggataccctcgtcatgccctcctttgcgcatgccgcgcaggtactgcagcaacgccagattcgggtgattaatttttccccagaaagcgctgtgccggatactatcttcgaaaaggttgcgtttaatgagtactttaaaagtgagtaacttcgccagacagggttactcgattgtctttcctttgtttctatttttcagcgcgattttttgcatgtccacccggaccaataatctgctgcatttatcgatcctgctgctattgctgtcgctggtacgccaggaaaaccgccaggcgctggccggggtgttacgcgagcagtggcagacctggacgctgctggcggctttctttatctattacgccctcagtaatgtgtggggccatacgccgcagcatattgactcgccgatcacccacggcgtgtatctgaccgggtatctgttgctgatgacgatgctgctcagggacggacgaacccgccgactggcgatgctggcggtggtcggcgggatcaccgtgctctccctgtggacgctgattatcgaccatacgctggttctcaccgaacgagcggtctcccccgagaaccccggaccaacgaacgttatcgaccttgccggttactgcggcatcggcattttaatttgcggcatgctactgaaagaaaaagccagccactggctctatctgccggtggtcatcatgctggtgatgctgctgctcacccaaagccgcgggccgatcatcgccctggtgctggcggtcggctgtacgctgcacctgcacgtcttcacccgccgcaacctgctgatcgccgcggcgctggccgtgctggtagcgctgcttttggtcatgacgccggtgggcgacatgctgctcgcccgtttcgaggagctgggcacccaaagcgggctgcgcctgagcatctggcaccatacgctgtcggagatggccagccagccgtggctggggcgcggtttcagctatgaactggatttcatcaactacagcggcgagcacatcaccaccacccacagtgtgtatatgggcgccctgctgaaaggcggcatcgtggggttactgctgctgttggcgatcattgcctgcgggctatggcaggcgtggcgcaagcgccataccgacagccgctacagtctggcgatcctgttttacgcgctggtgtttatggcctcgcaggggatgtttatcatcagcaatccccgggaaacctgggtgctgttctggctgccgctgggcattgcgctcagcaaagggttggcggaaaaacgctaacaaaaagggccgtcagcggccctttttatattaactttttaaatcaactgcgggcggcgaccagccggtcggcctgctctttaatcacgggccacaccgactcaatcgccacatcggcgacattcgcttcttcacagactatctgcttcgccttgtcatagcccggcgcccagatgtgatagccgggcagcccggtattcttgagtttgcgtttgttatagaccgccaccatcggcttatcgaaagcccgggcaatatgcacgatcgaggtgtccggcgtaatgactaaatcacagctgcggatcacttctacggcggagttgatggtgctgtcggcgatgtacagcgccatatccagccccagctggcggattttttcactgcgccccaccatcacgatacagacccggtaaggcagagcatgtagccgctcgaccagggtcgccacctggtgacgacagaagtctttatcctcggaggcggtaaaagggttaatggcgatacgcagttcgacctctccggcctgagaaagcaagcgggccactttctcccgctcatggcggcagccggggagatgatagtgatacgggcggtcgtcaacgatgccaaacagcttcaccacctgcttatagcgcagggaaatatggctgttgccgtcaaaaaaagcaattgagtgatcgtaaagtttatagggctctttattaaaaccaatcacgctggtcgcccgtaaatcggcgagtaatttaaagcgttcatagctggtcacgtcatcaaaatcgataaccgcatcaaaacccgccgcccgcaacgtatttaaggacatgcggggccgatataaatatacttgctgaatgaattctgagcctgctaatatttcgctgcatattggtccggttaacaccgaaacctgatatccccgttcggccagtattctggcgcagccggtcgtgaccaccatatcaccgactttatcatccagacgcaatagcagcacgcggcgcacagccgctgggtcgaaggctttacgcgccggcttatttctgtatcgatagttaattaaattaaatttaatgccgcggaaaaaggcattctttttccgcgttaattgtttaaggatacgcatacggtaccttgagctgtgttagcgctgtgtaattttccgctggtaatattctgccaacgtcatgcccttcacctgcggcgccagccagctaaaaaaggcttcgaggtcagcgtataaacgctcaatatcccgttcattctggaacgtggggctgccgccgggcatatactctgaagagtggagcatatattccacgtagtcattgccctgcgtcaacgtttgttcgacgacttttttcatcgtctccacattgccgcccatcggtcgcagccagtgtacggagggggagcgcactttgccgcgcaggcggtcgtaaccctgcttcacgctgttcatccacgctgagtgcttgtactggatgctcatcggcacttccagcagcggcgagtggccctcgcggctgatgtcattttcatcgaggaaataggcatgctgcggaaagcggcgataatcggtcccgccatcgccctgcggcgcccccttggcggtcttccagttcacccgcggggtcaccgagcaatccacctgatacccgtactccaccagcagacgcgcatagcgctcgtcaaaagcccagcgcccggcgcgatggctaaccattttggtctggaaggtatcctccagcagacgcgtcatatagtcgaccttctcacgcatcatagcgtcgctgtattcaataagataaggcttatggcgccagtcatctgcagtcagcggctcggtcggcgggctgttccacgcatgcagatgcatgccgacttccgcggtgccgcgggcaatcacgtctctggcgaattcgatataaaaggggtcgatggccatttcatagttggtcaaatagaccggtttaaagccatacttttcgcaaagctgctgaaaacgcggaagataacgcgcattctcggtggtgatgctgtcatgtttttgccagaggttatcgccctctgtatcaatcgtgatgagaaatgcgggattgtgcacgaaaacgtcctcaggccatacgtatcgggtcatggtagagcaatacaacgcttctctcaatctgtctgatcccctagaatcggaacccttatcctggatgaagaacagagtatgacgcctgaaaccctctcccgcggcccgttgaacccggcgcggatcctggtcattaagctgcgccatcatggcgacatgctgctgatcacgccgcttattcacgcgctgaaacagcagtaccccgccgccagcgtggatgtcctgttgtatgaagagacccgggatatgctcgcagccaaccccgatatccaccatatttatggtctcgatcgccgctggaaaaagcagggaaaaaggtatcagctgaagatgcaatggcagctcattcagacgctgcgccagcagcggtacgatatggtgcttaacctggccgaccagtggccgagcgcggttatcagcaaactgaccggcgccgcgacgcggattggttttgattttccgaagcgccgccacccggtctggcgctattgccacaccgcgctggcctccacccaacagcacaaccagctgcatacggtacagcagaatctctctattctcgctccgctcggtctccagttgaacgatgcgccggcgcggatgggctacagcgaagcagactgggccgccagccgcgccctgctgccggaggacttccgggaacactacatcgtcatccagccgacgtcgcgctggttctttaaatgctggcgtgaagatcggatgagcgccctgatcaacgcgctgtccgccgaaggatacgcggtggtgctcacctccggccccgatgctagagagaagaagatggtggataccatcatcgccggctgcccgcaggcgcgactacactctttagccggccagttaacgctgcgccagctggcggcggtgatcgatcatgcccggttgtttatcggcgtcgactcggtgccgatgcatatggctgcagcccttggcactccgctggtcgccctgttcggtccctcgaagctgaccttctggcgtccgtggcaggcgaaaggcgaggtgatctgggccggcgacttcggtccgctgcccgatccggacgctatcaacaccaacaccgacgaacgttatcttgatttaattcctaccgacgccgtgatcgcggcggcgaaaaaggtactggcatgagtaaattcaggctggctctggtgcggcagaagtaccgcccggacggcggcgcagaacggtttgtctcccgcgcgctggaagccctcgacagcagtcatctgcaactgaacgtcatcacccgcgaatggcaggggccggtgaaaccggactggcagatccatatctgtaacccccgcaaatgggggcgcatcagccgcgagcgcggctttgccaacgccgcgcgcgcgctctggcagcgcgagtccttcgacctggtgcagagccatgaacgtattcccggctgcgatctctaccgcgctggcgatggcgttcatcgccgctggctgcagcagcgctcgcgcattttaccggcctggaaaagccgcctgctgttcgccgaccgttaccaccgctacgtcatgcaggcggaacgcgagatgtatgaagactcacacctgcgcggggtgatctgcaacgccgagatgatcaagcgcgagattatcgaagactttggcctgccggcggagaagatccacgttatttacaacgccattgacaaccagcgcttcctgccgccagacgaagagacctttgccgccttacgcgccaaatggcagctgccgctgcaggcgacctgcctgatctacgtcggctccggctttgaacgtaaagggctggcggcggcgatccgcgccatcgctcccaccgatcgctacctgctggtggtcggcaaagataaggatcagccgcgctatcaggcgctggcgaagagcctgaactgtgaagcgcgggtgcgcttcttcggcatgcagtcggagacattgcccttctatcaaatggccgatggtctgctgctgcccaccctctacgatccgttccccaacgtcatcctcgaggcaatggcctgcggtctgccggtgatcaccactaccggctgcggcggggcggagtttatcgtcgacggccacaatggttacgtctgcgacgctctggatatcccggcgctacagcaggcggtaatggccctgcccgcgcgcgcgctgggctccgcggaaggcggtcacgcccgcgagcgcattatggcctgcaccagcgagcgactctcaacccagctgctttctctttatcaggatctggtgaaataacgatgcgcatcttatttgtgattgacggcttacccggcggcggcgcggaaaaagtggttctgaccctggcggcacagttcctgcgcgacggcgatcgggtgtcgctcatttcgctgcgcgatgtctgcgagtacccattgcccgaggggctcgactaccaggtagttgccgatcgctgccgtaaaccgtggcgcaagctgaccgagctgtcccgccgcgcccgccagctggacgccgcagtcgtgcgggccgaacagcaggggcaatttgaccttgtgctctccaacctgcacaaaaccgaccgcatcgtcgcccgcagccgggcgctgcgcgagcgtaacgtctggttctgtctgcacggcgtattctctgcctcctatctcgggcaccgcaccggctttgaccgctggatgaagcagcagaaaattaagcgaatttatcagggtcgcaacgtggtgacggtttccgacgcggtggggcgagatctggtggaagagtttgccctgcgcccggcacagctgaaaaccatctacaatcccttcgatatcactgccctgcgcgccgaggcggaagccgatagcgagcgcccggacggtgactacctgattcacgtcggtcgcttccatccgggcaaacgccatgaccgcctgcttgaagcctatgcgcagagcggcatcgacgcaccgctggtgctgctaggccagggaaaaccggagcaagagcagcgcctgcgccagctggcaaaaacgctgcacattgacgatcgggtgtggttcaaaggctttcagaaaaaccccttaccgtggataaaaggcgcacggatgctggttttgagctccgatagcgaaggattcggcaatgtggtggtggaggcgctactgttacatactccggtcgccagcacccgctgccccggcggcgtcaccgagatcctcaccggcgaacttgcccgcggtctggcggatctgaccagtccggcgctggctcagacgatgcaaagcatttaccataacccgccggccatcgacgatgccgcgctggaaaaattcagcgtcgtatccatttgtcagcagtaccgtcagctgcagcgcacctgacgccgttagttaaccaggatcgaagatttatgagtcaaacgcctttattgagcatcgtggctgccgtctacaacggtgagaaatttctagcgcaattctttgagtgcattgaacagcagcagctggacagctatgaactgatcctggtgaacgatggttcgacagacaacagcctggcggtgatcgccgaatggcaggagcggctgcagaacgtccaggtgctggagcaggaaaaccagggcgtctcggtcgcgcgcaataccggcctcgccgccgccagcggcaaatatctcgcgtttccggatatcgacgacaaactctatccgggcatgtatcgcacgctgctggagatggccgagaaagaacatctcgatatcgctacctgcaacggcacctatgtgtacgaaaagcgccgcgagagccacccgatcttcccactggatcgcctgccctcgacggatgtgctgccgggccatgtctggcttaagcaggccctggactcgcggaagtttctgcacgtcacctggcttaatatttatcgtcacgactttatccgccagcatcacttccatttcgagcctggcctgcgccatcaggatatcccatggaccacagaagccctgctggccgcggagcgcgtgcagtacaccagtcagcagttctatgattactacattcactctgagtcggtgtcgcataagccggacaacgacgacacgctgatgcgttcggcgcgccactatatgaaaattctggagatgctggaggcgattaaccagcgctacccggataaagtacgccatatcgccgcctgtcgctggcagatcgccaaagaaggcctggggatcatccataccttcgatagcatgaaagatgagtccaaaaagcatgttattattaacgaattcttcgaccgcggtatctggcggttaatctggaaaaacgcctgtactttccgtttacgctggcgcctgggacgccgttatctgcgtattaagcgttatcgccacgcgggatagaccaaaaacccgctgtttccgccaaagagatagctttacgcgggctaaatgcttagaatttgcccgccaaaacagagaacggataaatagtttggaattgctttataccaccctactttaccttattcagccgctggtgtggctgcggctgctgctgcgcagtcgtaaggctcctgcctatcgcaaacgctgggcggaacgctatggcttctgtcagaacaaggtagagccggatggcattctgctgcactccgtttccgtcggcgagaccttagccgccattccgctggtccgcgccctgcgccatcgctacccttctctgccgatcaccgtcaccaccatgacgccgaccggctccgagcgcgccatgtcggcgtttggcaaagatgttcatcacgtctatctgccctacgatctgcccggtgccatgaaccgcttcctgaacaccgttcagccgaagctggtgatcgttatggagaccgagctgtggccgaatatggtggccgcgctgcataagcgtaagatcccgctggtgatcgccaacgcgcgcctgtccgaacgttccgccaaaggctatgccaaactgggcggctttatgcgccgcctgttgagccgcattacgcttatcgccgcgcagaatgaagaagatggtaaccgcttcctctccctggggctgaagcgcaaccagctggcggtcaccggcagcctgaaattcgatatctccgtcacgccagagctggcggcccgggcggtgacgctgcgtcggcaatgggcaccacaccgcaaggtctggattgccaccagcacccacgacggtgaagaacaaatcatcctccaggcgcataaaaaactgctggagactttcccgaacctgctgctgatccttgttccccgccatccggagcgcttccctgacgcccgtgagatggtacaaaaggctgggatgagctttactctgcgcagcacgggcgagatcccctcctccagtacccaggtagtcattggcgataccatgggcgagctgatgctgctctacggcattgccgacctcgccttcgtcggcggcagcctggtggagcgcggcggccataacccgctagagccggcggcgcacgccattccggtgctgatgggtccgcataccttcaacttcaaagatatctgcgccaagctgcagcaggacgatggcctgatcaccgttaccgatgccgattcgctggtcagggaggtgtccacgctcctgaccgatgaagattaccgtctgtggtatggccgtcacgcggtggaagtgctgcatcagaaccagggcgcgctgtcgcgtctgctacagttactgcaaccttacctgccgcagcggagtcattaatgtcgaaccggctttccgtggtgatgatcgctaaaaacgccgccgacctgctgccggattgtctgggctccgttagctgggcggatgaaattatcgtcctcgactccggcagcaccgacaacaccgttgagctggcccgccgcctcggcgcccaggtctatacccataccgactggcgaggctatggcattcagcgccagcgcgcgcaggattacgccaccggcgactgggtgttgatgatcgataccgatgagcgcgtcacgccagaactcaggcaggctattcttaaggtactggacgccccccagcgcggcgccatctacagcatcgcccgccgtaactattttctcggacgctttatgcgccacagcggttggtatcccgatcgcgtcctgcgcctgtacgaacgcgcccgttaccgctataacgataatctggtccatgaatcgctggatagcctgggcgccgaggttattccgctgaccggcgatctcctgcacctgacctgccgcgacttcgctggcttccagcaaaaacagctggcgtatgccgccgcgtgggcgcttgagcgtcaccagaagggcaagaagacctcgatggcagggattttcagccatacgctgggcgcgttcctcaagacgttgctattgcgcggtggggtgctggacggtaaacagggatggttactggcgatggtcaacgcgcagtatacgtttacgaaatataccgagctgtgggcgctgagccacggctactcggagaaagagtcatcatgagcacaaaagcgatctatccgggtaccttcgaccccatcaccaacggtcatatcgatattgtcacccgcgcggcaagtatgttcgataaagtggtgctggctatcgccgccagcccgagtaaaaagccgatgttcagccttgatgagcgcattgcgctggcagagcaggcgacggcccacctggtgaacgtggaggttatcggcttcagtgatttgatggccaatttcgcgcgcgcgcagcaggccaatatcctgatccgcggcctgcgggcggtggcggatttcgagtatgagatgcagctggcccatatgaaccgccacctgatgcccacccttgagagcgtgtttctgatgccgtgcaaagagtggtcgtttatctcttcctcactggtgaaggaagtggcgcgccaccagggcgacgtttctcactttctgccagctaatgtgcatcaggcgctgttgaataagctgaagtaacgcatctgccgggacatgagccaagtcggctggcgcagcactacgccgctgggccattcacaccggctctgtcccggtctttgtgccagatggcgctacgctgacctggcctacaaacgcccccggcccaccagatgcgcacccgcaggcccgctgacctggccgacaaacattcctgttcctgagactacttctggcactgacggcaataaaaggtcgcccgctgggcatgtttggtcccgacgaccggcatgccgcagatccggcagggttcgcccttgcggccatagacctgtagctcctgggcgaagtagcccggcttgccatcgctttgcaggaaatcctttaacgtggtgccgccctgctctatcgaacgcagcaggaccagcttaatcaccttcaccagctgctcacactcttcccgcgacagcgaggacgccagccggtcaggatggatcccggcggagaacagcgattcactggcgtagatattccccacgcccaccaccagcttgttatccatcagccagggtttgatcgcggttttcttcttcgcgcatttttgctggagatagtcggcgttgaacgcgtcgctgagcggctccgggccaagatgcgccagtaccggatggccttccagcgttctggtccacaaccaggcgccaaagcggcgtggatcggtgtagcgcaacaccttgccgttactcatgaccaggtcaacgtgatcgtgtttttcagcaggcagctcttcgctcaggatgcgcaggctccccgacatcccaagatggacgatgatccagccgtccggcagctccagaagcaggtatttggcgcggcgacgcacgctgagaaccggaacgtcgctcaggcgataaatctcttcggaaaccggccagcgcagccgtccgttgcgcacgacggcgtgcagaatggttgcgccaaccaggtgcggctcgatgccgcggcggctggtttcaacctctggtaattcaggcatgattttcctccgtttacccgacgtattgtgcttcacggacaggtgactgaaaagggagtatgtgaaagcaatatgggggagttttaaaaacaaaaaaccccgccgaagcggggtttttatacaaggaggctaaaattatttaattttagcttctttgtagataacgtgctgacgtacaaccggatcgtactttttcagttccattttttccggtttggtacgtttgttcttcgtggtggtgtagaagtgaccagtaccagcggaagaaaccagcttgattttctcacgaatacctttagccatgatttatttcctctaagtacttagtacttttcgccacgggcacgcagttcagccagaactgtatcgatgcctttcttatcgattacacgcatacctttagcagatacgcgcagggtgacaaaacgcttctcgctctcaacccagaaacggtgagagtgcaggttcggcaggaaacggcgtttagtcgcgttcagtgcgtgggaacggttgttaccggtcaccggacgcttgccagtaacttggcagactcgggacatgtctattctccaaaaatcaaattagctcgagcttcgtatggggtattggcgcctcgtcaggctttacagcctggtcatcgcagttcaatgtgaactctcgactgccaggcccaaatgccaaacccgagattctcaaaggtggcgtagtatacgctgactcggcgatgtgctcaagtcccgaacagacaaagatcccgaaggatcgccagttcggggctaaatccagccacgttcggcaaaagatacatacgcaccgcggccgataaccagatgatcaagcacgcgtatctccatgaatctacaacattttatcaccctttcggtaatcagtctgtcggcctgacttggctccgggctaccggagggatgattatgcgcaaggatcacggcggcggcgttcactttgatggcttcgcgtacaatttctcgcggatgcacctcaacgtggctaagagtaccagaaaaaagacgactatgtttcaacacccggttctgattatctaaaaagatcaccataaagatctcgcgctcctcttccgtcagctggctttgtaaaaactcgcgcgtcatcgagggggtgaccagcgcggcctcctcgaccagctgcgagctaaaatagcgtcgcgccagctcggcaatgcccttcagttgcgcatatttcgccagccccagtccgtccacagcaatcagttgcgctttatcagcggaaagcagagcgtagagtgagccaaaacgctgtagtaacgcctgggcatagctgagcacatcctgacgacgcgtgccgacgcgcagaaaaagcgccagcagctcaacatccgttagcgtttcgatgccgtattgcagcatcttctcccgtggcatcagattttccattccgtccatgcgccctcctggatgaatcagcctatcctggcacagcctgacggcgctgccgacccgccgattttcaccctgcgtagccgctcgcaaagtgaatgcccggcagaggcacgacggcggcaggattgtgataagatgcgcggattctggtctacggcaacaggaagacatcatgatgactctggcgggtaaaaaaatcgtcctgggcgtcagcggcggcatcgcggcgtataaaaccccggaactggtgcgccggctgcgtgaacgcggcgcggaagtgcgtgtcgcgatgacggaggcggcaaaagcgttcatcaccccactcagcctgcaggcggtatccggctatccggtttccgacagcctgctcgatccggcggcggaagcggcaatgggccatattgagctcggtaaatgggccgacctggtgatcctcgccccagcgaccgccgatttaatcgctcgcgtggcggccggcatggccaacgatctggtgtcgacgatctgtcttgccactccatccccggttgccgtggtgcccgccatgaaccagcagatgtatcgcgcgcaggccacccagcataatctgcagacgctcgctactcgcgggctgctgctatggggaccagacagcggtagccaggcctgcggcgacgtcggcccggggagaatgctcgatccgctaactatcgtagacatggccgcgcagcatttcgcctcccctgtcaaagatttgcaacatctcaacctcatgattaccgcgggcccgacccgtgagccattggatccggtgcgttatatcaccaaccacagctctggcaagatgggcttcgcgattgccgccgccgcagcgcagcggggcgcgaatgtgaccttgatcagcgggccggtatcgctaccgaccccgccgtttgtgcagcgcattgatgtcactaccgcgctggagatggaagcggccgtccaggctggcgcccagcagcagcacatttttattggctgcgccgcggtagcggattaccgcgccgccgtcatcgccgaagataaaataaaaaaacaaggtgatgaattaacaataaaaatggttaaaaacccggatatcgtggccggggtcgcggcgctaaaatcacatcgcccctacgtcgttgggtttgccgccgaaacgaataatgtggaagaatatgcgcggcaaaaacgtgcccgcaagaacctcgacctgatttgcgccaacgatgtttcccagcctaatcagggctttaacagcgacagcaacgcactacaccttttctggcaggatggggaaaagcgcttaccacttgagcgcaaggaactcctgggccaattattactcgacgagatcgtgacccgttatgatgaaaaaaatcgacgttaagattctggacccgcgtgtcggccagcaatttccgctgccgacctatgccacctccggctccgccggacttgacctgcgagcctgtctcgacgacgccgtagagctggcgccgggcgcaaccacgctgttgccgaccggccttgcgattcatatcgccgatccctctctggcggcggtgatcctgccgcgctccggcctgggtcataagcatggcgtagtcctgggcaacctggtgggccttatcgactccgattaccaggggcagctgatggtgtccgtctggaaccgcggtcagcagagctttattatcgagccgggcgaacgtatcgcacagatggtctttgtgccggtcgttcaggcggaatttaacctggtggaatccttcgatgccaccgaccgcggcgaaggcggcttcggtcactcagggcgtaaataagcccagcaacacggaatctgcatcccaacgcgcataacgcaataacattaccgcaagccctggtttgcggtcgcgttgtggatgtctgcctgacaagtgcttattttcaggggtattttaaaacatggcagaaaagcaaactgcgaaacggaatcgtcgcgaagaaatacttcaatctctggcgctgatgctggaatccagcgatggtagtcagcgtattaccaccgcgaaactggcggcttccgtcggcgtctctgaagccgcgctgtatcgccattttcccagcaaaacccgcatgtttgacagcctgatcgagttcattgaagacagtctgattacgcgcatcaatttgattttgaaagatgaaaaggacaccaccgcgcgcctgcgcctgatcgttctgttgattcttggctttggcgagcgtaatcctgggctgacgcgtatcctcaccgggcacgcgctgatgttcgaacaggaccggcttcagggtcgcatcaaccagctttttgagcgcatcgaagcgcagctacgccaggtgatgcgcgagaaaaaaatgcgcgaaggcgaaggctacaccctcgacgaaaccctgctggccagccagctgctggctttctgcgagggcatgctgtcgcgctttgtgcgcagcgagttcaaatatcgtccgacggatgatttcgacgcccgctggccgctggtcgccgcacagctgcagtaaatcctcacatgcagccgccaggctgcatgattctcctcgcaatctgcgtaagtttgtcgcaaatcccagggccattggttgaattgcccaatgcgcgtttccgctttcctttcctactatccagcttgctgaacatttcaccctcccccaacaccacccgacaaggagagatttgatggcgacgtcacggcgggatttactgaagataggcgggttggcaaccgcatcgctactggtcagtcaaaaaagcttcgcagcatgggccccctctgaacgctatccggacccacgcatcgtggccatcgatgatagctttcgtcgctatatgcttgccagcgcaaaggtcgaacgcatcgccagcggcttccgctgggcggaaggcccggtctggttcggcgacatgcgaatgctgctgtggagcgacattccgaataacgccatcatgcgctgggatgaagtcagcggagaaaccagcatctttcgctacccggccaattatagcaatggtcacgcccgcgacagacaggggcgcttaatcagttgcgagcacgacacccgccgcattacgcgtaccgaatacgatgggtctgttaccgtactggccgatagctaccagggtcatcgcctcaattctccaaacgatatcgttgtgaagtcagacggcaccatctggtttaccgatccgccatttggcatcagtggtttttacgaaggccacaaagcaacatcagaattgccgcaaaacgtctattgtctggagccggaaagccgcaaactgagcgtggtactgggcgacgtaaaagggccaaatggtttgtgtttctcgccggacgaaaagaccttatacgtggtggaaagccgggcgacaccgaaccgcttaattctggcgtgggatgtggaaggcaatacgctgaaaaataaacgggtatatctcgactgtgggaacggtaccgccgatgggatcgcctgcgacgcagacggcaatctgtggtgcggatggggaagcggaaacgaagaactcgacggcgtgcggatcttcaacccacagggtaagcatatcggcaccattaaactgccagagcgctgcgcgaacttgtgctttggcggcgaacagcgcaatcgtctgtttatggcgtccagcacgtcaatctattcgctgtacgtcaatgcgcagggcgctaagctgatatagcggaaatccggcagccgaggctgccgggcgcatcatcagacgccgtaggcttcacgataggcgcgaactgacgccaggtgttccgccatctccggcttttcttccaggtaagcgatcagctctttcagagtgatgattgagataacctggcagccgtaatcccgctccacttcctgaatggcggagatctcgccgcggccgcgttcctgacgatccagggagatcagaacgcccgccagcagcgcgccctgggcctggataatctccatggattcgcgaatcgccgtaccggcggtgatcacgtcatccaccagcattacccggccctgcagcgggctaccgaccagattgccgccttcgccatggttttttgcctctttgcggttaaagcagtaaggcagatcgcggtcatgatgctcggctaacgccaccgcggtggtggtggcgattgggattcctttgtaggccgggccaaacagcaggtcaaactcaattccggaatccaccagcgcctcggcataaaaacggcccagcagagccagatcgcgcccggtgttaaacaggccggcgttgaagaaataggggctcttgcgcccggatttcagcgtgaattcgccaaacttaagaacctgcttgctaagcgcaaactcaataaactggcgctgatacggcttcatggattcgctcctttggtacttttcatcattgtcagactgcgcgctccccttcgcaggtgtgatgaaggataaagcgcaaaaaaaaggcgacttctcagtcgccttaatcattaattttctaacgccgccttctgcgtcgtgataatggactcgatcccccctcgggctaacgccaggagagtgaggagttcttcatgggtaaacggctcaccttccgcagtgccctgcacctcaataatacggccatcttcggtcatcaccacgttcatgtcggtctccgcggcggagtcttcgatgtactccagatcgcagatggcttcgccatttacgataccgacggagaccgcggccaccatccctttcatcggattggttttcagcttgccggcggcgaccagcttattcagcgcatcggccagcgccacgcaggcaccggtaatggaggcggtgcgggtgccgccgtcggcctgcagtacatcgcagtcgagagtaatcgtgaattcgcccagcgctttcaggtcaaccgctgcgcgcagcgcgcgggcaatcaggcgctgaatttccatcgtccggccgccctgcttgccttttgccgcttcacgcgcgttacgcgtgtgcgtagaacgcggcagcatgccgtattcagcggtgatccagccctggccctggcctttcaggaaacgcggaacgccttcgtcaatagaggcagtgcacagcactttggtatcaccgaattcgaccagcacggagccttcagcgtgttttgtgtaattacgggtcagggtgacgggacgcacctgattagcgctacggcctgctggacgcatgatagaaatctccggcttgaaacgaatgtgagggcgcattatacgaatttcatggcaaaaagcctatgcccactccagccggacgcgccgataatgtcagtccagcgttttacgataagatttcaaccccacaccaatgacaatcaccgccaggcctatcagcggcaagaggtcaggcaacaatgccattgctgaatagcctttcagcataatgcccttaaccaggcggatgaagtaggtcaacggtaaacaggagccaatggctttcgcccagtctggcatactaataaaggggctgacaaatccggacagcataagtgaagggatgaaataaaatgacgacatttgcagcgcctgcagctggttttgtgctaagccagaaataccgataccaattgacagacaaagaaagacataaattaacagcacaaaaaatagtaggaagacgctaccgtgaagggggatatcgaacaacaaaacggcggcaatcaggattaacgtcgcctgaaacagaccaatgataacaaaaggcgttattttcccaataataacctcaagcccggacaacggagagaccagtaaattttctaacgccccgttttctcgctcgcgggtaattgacagggcggtcatcaggattaacgttgtactgagtatcgaccccataataccgggaatagtattaaactgggttatcccctcagggttaaacatgcgatgaatgataagctcgaaatcatcctctttttgcaccacacgcatgtcgcccggcaaatcgtgctgaaacatcgacttcgccacctgcacaagggcgctgagcgcattccccgtggtgatcggatcgatggcatccccctgaattaatagttgtggcttttctccacgcagtaacttgcgcgtaaacccctcagggatcgtcacgataaaagtgacatccccccgcacaaaggctttctgcgccgcctcttctgaatcgacaggaatcatcgaaaaatacccggtattttgcgcttccgtcacaaagatttgactcatgcgttcggtatcataatttagtaaggcggtcggaagattatgcggatccatattgatggcatagccaagaatgatcagctgaaaaagaggtgtcaggagcaccatactgatgctgactttatcacggcgtagctcgtgaatttccttaataaccacgccaatccaccgcgtaacggagaagctaaaattaatttttttcacaattatttttcatcaagtaggtaaatgcatcttccagattggtatccaccttacagaactcataaccctgttgcgtaaaggcaaaaagcgcggattttaacttcgcttcatctctggatgtaatataaagctgattgccaaaaatgaccgtttgctcaatatccggcaagcgctgtagctggctttcaagcagcgtcagaccggcgccgctggttcgcatggtgatcaaattctgggaggcgataatcgacgcaatagtgccattcgccagcagccgaccataagatagataggcaaccttatggcagcgctcagcctcatccatataatgcgtgctcaccagtatcgagatcccccggtcagagagctggtgcagcatttgccagaactctcgccgcgccttgggatccacgccagcagtcggctcatccagaaatagcaaaacaggttcatgcaacatacaggcggcgagggccattctttgcttccagcccccagaaagctccttagccagctggtgctgtcgggcagtgaggcctaactcagaaagcgcacgttcaacccgatctctacgctgatcgaggctatataatcgcgcaataaaaagtaagttttcccgaatagttaaatttccccacattgagaaatactgggtcatgtagcctatctttttctttatcttttcccgctgcgtaaagatatccatacccagacaagtaccttcaccggaatccggcgtaatcaaaccacacatcattcgaatcgatgtcgtttttccgctaccgttcggaccgagaaaaccatagatctcgccttttgctacctgtaaagagaaatcctttacgacgtgatgctcgccaaaatgtttattgagattttttacatcaatacaaagattattcatcgccaataatctccacatcaaacggttggccgattttcatccgccctgcctgctgcagcgcagggatagcctccgccataaaaatgagcttctcacgacgtttcgtactataaataactggaggcgtaaactcggcctcagggctgatatagttaataacgccagcaatgggctcagcgcaaccatcgcatataagttttaccttagatccgattttaaatttaccgagcttcgcttcgggtataaagaagcgtacttttatattctcaggaggtaacagactgattattggtttaccagcagaagggcgctccccggcacgataaataatatcgaagactttagcattgaccggagaaacaatcgtcgtttgctggacatcccacagcgccttatcccgttcgagttttgccgcggccaccattgagcgctgcttgctaatctcatcctgccgggcagggagttgccgtgctttgagttgattaattaactcttcaacctgtgcgcctttttgagttaattcatcccggatatcctcccattccgcaagcgatatggcatgattggcgtaaagattacgatatcgcccaagctgccgctttacctgggattctgccgattgtgctttttttatctgcgaacgtataatatccaactcttcaggccgttcgccagattccagatttcgtaatagagcgctctctgctgatagcttttcctcagcgcgcaggaaaatattttgcgcatcgaaggactcaatcttcactaactcctgtcctgcggcgacgttatctcctttattgatcaagatccgttctattttttcattaccagaatatgaaaggtatacaaattctccatgtgaataaccggataacatgttatctggtttgttatcacacccggtgagtatcagcaccgatatcaatataataaatacatttattggctttcgcattaaaacgcatccatacgcatatcatttcccttatcactacggtctggattgaggcacgctcgctccaggaccggacaatcatcgtcagtttaatctcttaaataatgcttaacgtagctttcattcaatttatctatagagctcagatttaacccagctatcgaattaaaagaatcatcttttgtgaatgcaagaatcgacgatccgcccggggagaaccatttagcactctgtttaaaaggccagggaagttcataaccttcttctctcagcaggtgattgagcatgctccagtctgctctaaaatcttcgccacaaaatggagtatcatcctgtacattttcggcagtgaacaatgctatcggcgaacaaaaatcagctgtcgaggaaaagtatatattatagaaactgatgatgagtttctgtactttttcaggaaaagttccaggaatggtcagcacacccagcaagtatttatagtccggatatctttttataaagtcaaatatcccttgccataaataatcaagcaccttacttttttgataaggtttctgaataaagccgcggccaatttccacacacttctctaaacaggaataggcattatcatggtatttaaacaagctgttgctatagaggcctgttacaccatgttgggccagctgctcgccaacgggcataacacgatatgctcccaggatttccacatcagaaggatcccacaaaatgatatgataataactttcatcaaaaacatcgttatctcggtcgttaccagttccggcaccaatatcgcgataacagcgttcgcgtaagcgccctaactcatcaataataggtgaggttcggttagtattacagcgatatatcactagttttctaccgtcttcaaactgccttaatatttcgcactcctctattgcgctaattagctcctttttacctggttctaattcttgcggcgcaatcgtatctaacatagccgggccattcttcgctatactctggaggtgcgtcaaacatacatttgccgcggcagaaagatctttattgtattctttaaacgaggataaggctatttgctgtcctatattgattttcatggtcttgccatgatggcggagagcttcacgaataaccatcatgttcgacagttgccgccagaatgttgcagtaagataataaatcttactgtttgctcccgtaatatgaattggtaccaatgctgcattatttctcatagcaagctgtaaaaaaccggggttccacttatgctcctgtaacccggaaagagaccagttagccagcttacccgcaggacatataatcaatacgcctccttttcgcaggtgatcgttcatctcgcggaattttttatggctcatcttaccggccatattctcaattccaatggtaagttccgatacctgggggaatataattggcaaaacgtgattagctattatttttatatcactcctgactcgggagaccgtatgtattaagctaagtccatcgataaccgtcggatgatttgaaataacaaccgtagccccatgcccaggtatgttgttaagttggtggtgttcgctttcacatttcaactcaaggagttcaacaactgcattaacccactcgaccccatttttattaacgagtcgctcgttatatattaagcgagaaaataccttattgccaaatgccgtcctgaacagccattttttccaaaaaggtatggttgtatttggaaaaaattcccttacgactctgtcaaagatagcgtccatattaaaatcctttttatagaactcatcttaaacgactatactagcgttctttcagtcggacaataccgcataaaacttaaaaaggccaaaacaaaactattagatataattaatacaacagtattctcaccataaatacaatcaccaaagttttaataaatttatagtaatcaatgcaaaaaaaacatacataatgcttaaaggtaataccctatctcatttctggtggttatacttcctaaaactcacagaatagcttgtctggcggtatatgcatttgtacaaaggcatccgaattccatgcccgcatctaatatcagaaaatattaactacggattcccataatatataaccccacctacagcccctggcgaaaataactttgcggcgatatcccttaaaacaatcgtccttgaagtatttcatcactattcctgttaagtcaccgcccgcacggctataatccttgcattcattattacgaaaacaggaacgcctatgatccgcagtatgaccgcctatgcccgccgtgaaatcaagggtgactggggtagcgccgcatgggagctgcgctcggtaaaccagcgctatctggaaacgtacttccgcctgccggagcagttccgtagtctggagcccgtggtacgcgagcgcattcgcgcccgcctgactcgcggtaaagtcgaatgcaccttgcgttttgaacaagatcccagcgctcagggtgaactcatcctcaacgaaaagctggctaaacagctggtaaacgctgccaactgggtgaaaatgcagagcgatgaaggggaaatcaacccggttgatatcctgcgctggccgggcgtgatggccgccaaagagcaggatctcgacgccatcgccgccgacattctggccgctcttgacggcgcgctggacgacttcatcgtcgcccgcgaaacggaaggccaggccctgaaagcgcttatcgagcagcggcttgaaggcgtgagcggcgaagtagcgaaagttcgcgctcatatgccggaaattctccagtggcagcgcgagcgtctggtcgccaagctggaagatgcggaagtgcagctggaaaataaccgccttgagcaagagctggtgctgatggcgcagcgtatcgacgttgccgaagaactggaccgtctcgaagcgcacgttaaagagacctataacattctgaagaagaaagaagctgtgggtcgccgtctcgactttatgatgcaggagttcaaccgtgaatcgaacaccctggcgtcaaaatcgattaacgccgaggtgaccaactccgcgattgagctgaaggtactcatcgagcaaatgcgcgagcaaatccagaatatcgagtaacgctttctcgtttgttaatgtatttcggtatccagggccatgataaatcatggcctttttatttatctctctcacgggcgaatgataagaatctacttataaaaaatagtcgtccagttttcggttgtggcaaataagcacaacgcggcacagtcaggaaaacactaccgcgagagaaaagaatggactttaatgcgcttcaccagcaaaaccaacctttgttgcttgccaatgtctgggatgccagcagcgctcaggctgctcagcaggctggttatcaggcgctgggatcctccagcgctgctatcgccgcaatgttagggtatgaagatggcgaagagatgagttttgacgagctgttttatgtcgtctcacgcatcaaaaccgttagcgaactgccgttaagcgtcgatttagaggcgggctacggcgcgacaaccagccacatcattgacaatatccggcgtctggcgcatctcggcgtgagtggaataaatctcgaggatagtcatgtggtggatagtacgcgtcgtcttgacgatgcggagcgctttgccgtcaaactgcaggaaatcacccgcgcctgtcccggtctgtttgttaatgtccgcaccgatacctttcttctcaacgtacaagatgcgctggttcaaacgctctatcgcggtcaactctacgccaaacacggcgcatgcggtttttttgtgccttgcgtcacccgcgcggaggatattaccgccatcgttcaccacgtgcctttacccttaaacgtaatgtgtatgcctgagctggctgacttcagcaccttatcgactctgggcgtaaaacgaatttcgatgggcaattttatttatgctgcgacgcaggccagactgaaagacttattatgtcaggtgcaaacccaacactctttctcaggtgttttttgaccatgaaaattaccgacagcatgcagtgcgatatctggtatcaggcgctgcttgaacgcgcggtggaattcaccggcgtttttttcgtcggcgtgaaaaccaccggcgtattttgtatctcggtctgtcgggcgcgaaaaccccggcgggaaaacgtcgaattttataatgactttaaatccgcgctggatgccggcttccggccatgcaaagtctgtcgcccgacggagaatgcccggacggcccccgcctttgttgaacaagcgctccgcctgctgcgagaagctccaaaggtccgcctcagcgatagcgagctacgtcagcacgatattagcccggaacgcgttcgccgctggttcctgcaaaaccacgggatcacctttcaggcttttcaacggatgcagcgtttgaatatggcgcttcaggaattaaaagcaggccgctcaactaccgatgtcgctttcgatagcggttacgagtccttaagcggcttcggctatacctgcaaaaaattgaccggtttcgcacccagcgcgcaacgccaggttgttttaattcatcgttttaccaccccgttagggccaatgtttgtttgtgcaacgcaacggggaatttgtctgctggagtttgtcgacagacgagcgctggagtcagaattcagcgacctgcagcggcggttcaacgccagcatcatcgcaggtgaaaatgcccacaccaggcaggcgcaacaggaaataacggagtatttcgccggacagcgtcaatcgttcgaggtggcgcttgataccccaggcagcgaattccagcgagcggtctggcgccgtttacagcacgttagcttcggtgagacgacgcattatcaatcgattgcgatggagataggtaaaccaacggccacgcgcgcggtggctgctgcaaacggcgctaaccgcgtcgcgattatcatcccgtgccatcgaattatcggcaaagatggttcgatgaccggttacggcggcggcattgcacgaaaaatatggcttattaaccatgaggcaaccatcagggaaaaacgcggctgattttactttcaggatcaacgggcccctccctgactttcaccgcggctcggtaagcctattttttatccagcgcccggcaggttaaaaacgcccctgccgcgcacagcagcgccggagccagatagctgtgatccatgtgggtaaactccatcaccagcgccaccgcggtcagcggcatctgcatggaggcggcgagaaacgcggccgcccccaccacagcgaagctacttttatcaccgccagggaagccgagctgccagagcgcgcagagcagcaggctgaccaatccgcccaccgccagccctggggttaacaatccaccctccgcgccgccgcgcagcaccgccagaatcaccaccatcttcaatactaacaggacagcgaccatggagagaggcagcccgtcgctgagcgccagctgcattggacccttgccattgcccggaagctcggggaaataaagactcaggatggcaagaagagaaaaccccagcagacagaacaccggcatctgccagttacttcgcgcgcgtgaacgcgccgcgctggtcgctttgcgaaagagccaggcgccggtgccaagaatcgggcccgccagaatcgcccaccagagaaaggtgtgcggaagtgcgctggaaacaaaatggtattgcgattcatcccctaaccccagggtggccgtccaggcggcaatcgccgaggtcattatcgccgctagcgttttttcccagctaaacgacagcagcatgacctcaaggctgaacaacgccccggccagcgggacgttatagaccgccgccagacccgcgcccgccccacaggcaatcagcgtgcgggtttcatcttccagcaggcgcagcttacgcgccaccatccccgcccccagcgcgcccatttcccggggcgccacttcgcggccaagcggggagcccagcgctacggtgacgatctgcagcagcgcgtggatcgtcgtggtgcccgcgggcatgggtacgcaggggttggccaccgccgccgcaatggaaacccgcctctgcccatagcgaccaagcagccaccagccaaatccggcgacggcgccgccggccacgattgccacgatgcggcgtggccaggacgactccgtgacgccctgtaaaaatgacaccgaaccgacgatctgcccataactgtaaccaaaagccaggtgctgaatcgcgtgtaaaattagtgccaaaaccatgccggacagaccggccagaatcccggttaataccacggctatcaggcggatcagatgatttttattcccggcggcgacgctcattttctctggccttgaaaaggaaaaataaaagaataaaggacgagacttaaacattgcgtaatcatagtgttttcgatagtgatacccatcgcttcacttagcattactttttctaatcaataaaaatccctaaaaaatcaatcaacctttaaatcaagccatcacagatactatttccattaatttttcctggcgtaaatgattcgctttagaaaatctcaatcgtgatcctgcgcacaaatcgttaacctgcccgccattacctggggggatctatgctgcttcatgttctgtatttaatcggtatcaccgcggaagccatgaccggcgcactggctgccgggcgccggcggatggatacgtttggcgtcatcattatcgccactgcgaccgcgctgggcgggggttccgttcgcgatatcctgctggggcactatcctcttggttgggtgaagcatcccgaatatgtcatcattgtcgccgtcgccgccgtcctcacgaccattgccgctccggtgatgccgcaccttcgtcggctgtttctggtgctggacgcgctggggctgatcgtgttttccatcatcggcgcgcagatcgccctggacatgggcgaaggcccggttatcgcctctattgccgccgtgatcaccggtgtcttcggcggcgtactgcgcgatatgttctgcaaacgcatcccgctggtcttccagaaagagctgtatgccgggatctcctttgccgcagccgtactctatattgctctgcaacattacgtcagcagccacgatgtggtggtgctggctacactgctgttcggctttaccgcccgcatgctggcgctgcgctggaaactggggctaccggtcttccactacacccatgacgcccactaaccgccttaaaatccggggatgcgctgcccgctaagccattgcgccagcgccaccacgtccggatggtgcaggaaagccaccagctggcgggctctgatctcccccacgccaggcagcgtgcgccattgcgcttcactttttgccgccagcagatgccagttctcgctttcgagctgcgccagcgccccctgcggcaccgggatccccatcgccagcacccagcggataaaaggtcgtttgcgaacgagatcaaactgatgccagaggtgctgcccgcgggcggcggaaatccctggcaccgcctgcagctgctcaacggtaagcgccagccaggaaaaaatatgcgtcatcgggttttgctgctgaatgacgcgccataaattttcccccacgccatcgacattcagggcggactttgatgacaaccagatcagcctggaaagaaactgttcgctgcactcaggggtggcgaaatagcaggttagcgcattaaatttcgccggcggcggcgtcggtttatggcgctcggccgtccgccagacgacggcgtcgacccgaggaataccctgccctgccagactgatctgcagctgatcgccaaccccaatatccagcatctgccagcgggacacagagccaacgttaacccgctgcacgcgtttatcatccagccgctggggctcaagctcggccaccacgttgagtctgccgctgcggccgatactgaaacggatcgcccgtacctgcatcacccgcgatgccggaggatatttccaggctgccagccactcgccctttccgggcgaccagactcgtcccggcggctcgcgtccttcgcgcacaatcacaccgtcgctgacgaagggcagcggcgagcgataccaacgctggcgccactgcgccacctgctcgatgcgcgacaccggatgggtatattgtccgctgtacttaaaccccgcctgcgccagcagctgctgacgacggcgcatatccgacgggccgtctggccaggcccagataaaaacgtccagttgactgagcgccgctgccgcgtcggctcgcatcatcaacccggcgactttcgcccgcgcattcatccccccggtctgctgctggacatggccgtcccggcgcagaaacagttccccctgcagtacgctgtcggccagttcaccggtcatcactttcgccagcgccgggatctgccgcgctcgggcggtccatgcctcaccgcgtagaccatcgccgcggctaatggcctgaaccagacgcccctggcgataaacgagagtcaccgccacgccgtccactttaggctgtatccacaggtcggatttatttttcatccagcgggcaacgctgtcctcatccgccagcttgcgcacgccggtatgggccaccggatgacgcgcatcgccggtgggcggaggcagatcgtcatcctcaggcgtcgcgcccggaaagcattgtcgccactgcgccaggcgcagggtgagctggtcgtaaacgtcatcgctcactccgctggcgccctgccgccagtaagcctctttccaggcgacaatttgctgatgaaggcgtgatgtctcctgccttcctctggccagcggccagtccggacacgtcgccagcgcgctggcagagaacatccctaacgccagccaccaccctcctttacgcattgcagtcccctcctccatcacctggcggagagtctgcggcggaatgccgcgagccgcgacggaagctttttcgccttgcgaagcgccttccaggatttacgcctctttgcagcaacggctggcgaattcaggaaaacggcaggcaaaatgaaagaaacagcggcaaaaagtgtgacaatgactgcgtcacgccgcggcgacgtgtataataggctcgtatgtaggacctctttcgataaccacatacaaaagacactcatggctcaaggcacgctttatattgtttccgcccctagcggcgcgggtaaatccagcctgattcaggctttattaaaaacccaaccgttgtatgacacccaggtatcggtctcccataccacgcgggcgccgcgtccgggtgaagtgcacggcgaacactatttcttcgtgaatcacgacgaattccgctcgatgattggcgaaaacgcgtttctggaacatgcagaggtctttggcaactattacggcacgtcgcgtaaagcgatcgagcaggtgctggcgaccggcgtcgatgtcttcctcgatatcgactggcaaggcgcgcagcagatccgtaaaagcatgcccggcgcgcgcagtatttttattctgccgccgtcaaaagatgaactggaccgtcgcctgcgcggccgcggccaggacagcgaagaggtgatcgcgaaacggatggcccaggccgttgcggaaatgagccattacgcggaatatgattacctgattgtgaacgatgattttgacaccgccctgagcgacctgaaaaatatcatccgcgctgaacgtctgcgcatgagccgccaaaagcagcgacatggcgctttaatcaccaaactattggcagactgaacccacattcagtatcatgcccagtcatttcttcacctgtggagcattttaagtatggcacgcgtaactgttcaggacgctgtagagaaaattggtaaccgttttgacctggtactggtcgccgcgcgtcgcgctcgtcagatgcaggttggcggaaaggatccgctggtaccggaagaaaacgataaaaccaccgttatcgcactgcgcgaaatcgaagaaggtctgatcaacaaccagatcctcgacgtacgtgagcgccaggaacagcaagagcaggaagccgctgaattacaagccgttaccgcgattgctgaaggtcgtcgttaatcacacagcgggtcgcccttgtatctgtttgaaagcctgaatcagctgattcaaaactacctgccggaagaccagattaagcgtctgcggcaggcgtatctcgttgcacgtgacgctcacgagggtcaaacacgttcaagcggtgaaccctatatcacgcacccggtcgcggtagcctgcattctggccgagatgaagctcgactatgaaacgctgatggccgcgctgctgcatgatgtgattgaagatacccccgccacctaccaggacatggaacagctttttggtaaaagcgtcgccgagctggtagagggggtgtcgaaacttgataagctcaagttccgcgataagaaagaggcgcaggccgaaaactttcgcaaaatgatcatggcgatggtgcaggacatccgcgtcatcctcatcaagcttgccgaccgcacccacaacatgcgtactctgggctcgctgcgcccggataaacgccgccgcatcgcccgcgaaaccctggaaatttacagcccgctggcgcaccgtttaggcatccatcacatcaaaaccgagctcgaagagctgggctttgaagcactgtaccctaatcgctaccgcgtcattaaagaggtggtcaaagcggcgcgcggcaaccgtaaggagatgattcaaaagatcctctccgaaatcgaagggcgtttgcaggaagcagggatcccctgccgcgtcagcggtcgcgagaagcatctatactccatctactgtaaaatggtgctcaaagagcaacgttttcactcgatcatggatatctacgccttccgcgttatcgtccatgatgccgatatctgctatcgcgtgctcggccagatgcacagcctctacaaaccgcgtccgggtcgttttaaagactacatcgccattccgaaagctaacggctatcagtctttgcacacctcgatgatcggcccccacggcgtcccggtcgaggtacaaattcgtaccgaagacatggaccagatggcggagatgggggtagcggcgcactgggcttataaagagcacggcggcgaaagcagcaccaccgcgcaaatccgcgctcagcgctggatgcaaagcctgctggagctgcagcagagcgccggtagctcgtttgaatttatcgagagcgtaaaatccgatctgttccccgatgagatttacgttttcaccccggaagggcgcattgtcgaactgcctgccggcgccacgccggtggacttcgcctacgcggtgcataccgatatcggtcatgcctgcgtcggcgcgcgcgtcgaccgtcagccctatccgctgtcgcagccgctctccagcggtcagactgtcgaaattatcaccgcgccgggcgctcgcccgaacgccgcctggctgaactttgtcgtcagctcgaaagcgcgcgccaaaatccgtcagctgctgaaaaaccttaagcgcgacgattcggtcagccttggccgtcgtctgctcaatcacgcgctgggcggaagccgcaaactcgccgagatcccaccggagaatatccagcgcgaactcgatcgcatgaagctggcctcgcttgacgatctgctggcggaaatcggtctgggcaacgccatgagcgtcgtggtggcaaaaaacctgcagcagggcgaagccgctgcggcgccggtaccggctaacgcgtcgaaccacggtcatctgccaatcaaaggcgccgatggcgtgttgatcaccttcgccaagtgctgtcgtccaattccaggtgacccgattatcgcccacgtcagcccgggtaaagggctggttatccaccatgaatcctgtcgtaacattcgcggctaccagaaagagccggagaaatttatggcggttgagtgggataaagagaccgctcaggagttcatcaccgaaatcaaggtggacatgtttaaccaccagggcgcgctggctaacctgacggcggcgatcaacaccgcgtcttccaatatccagagcctgaatacggaagagaaagatggccgcgtatacagcgcctttatccgcctgaccgcgcgcgaccgcgtgcatctggcgaatatcatgcgcaaaatccgcgtcatgccggacgtgattaaagtcacccgtaaccgaaactagctttatgaactcaaagcgctacgagcgtatctgcgagatgctcgccaggcgtcagcctgacctgacggtctgcatggagcaggtccataagcctcataacgtctctgcggtcatccggaccgcagatgccgttggcgtacacgaagtgcatgccgtctggccgagcagccggatgcgtaccatggcctccgccgccgcgggcagcaacagctgggtgcaggttaaaacccaccgcactatcgcagatgccgtcggccacctgaaaggccagggcatgcaaattctcgccactcacctttccgacaaagccatcgattttcgtgaaatcgactatacgcgtccaacctgcatcctgatgggtcaggaaaaaaccggcatcacccaggaagcgctggcgctggccgatcaggacatcattatcccgatgatcggcatggtgcagtcgctgaacgtttccgtcgcctcggcgctgatcctctacgaggcgcagcgccagcggcagaatgccgggatgtaccaacgcgccaacagcatgctgccgccacaagagcagcagcgcctgctgttcgaaggcggctatccggtgctggcccgcgtcgcccgacaaaaaggtctgccttacccccacgttaacgagcagggcgaagtggaagccgatgccgcgtggtgggccaccatgcaggctgcgaggtaaacccaatgtcaggccgcctgttagatgccgttccgctcagttcactcaccggtgtgggcgctgcgcagagcagcaaactggcgaagattggcctgcatacggttcaggacctgctgctacacctgcctttacgctacgaagatcgcacccatctttacccgatagccgagctgcttcccggggtttatgccaccgtggaaggtgaagtcctcaacagcaatatcaccttcggcggccggcggatgatgacctgccagatcagcgatggcaccggcatcctcaccatgcgctttttcaacttcaacgcggcgatgaaaaacagcctcgcgaccggtcgtcgggtgctggcctacggtgaagccaaacgcgggaagtacggcgccgagatgatccacccggaatatcgcgtccagggcgatatgagtactccggagctgcaggaaacgttaaccccagtttatccgaccaccgaaggcatcaagcaggcgaccctgcgcaagctcaccgatcaggcgcttgagctcctggaaacctgcgcgattagcgaactcctgccgccggagctggcgcaggggatgatgagcctgccggaggcgctgcgtacgctgcaccgcccgcctccctccttgcaacttagcgagctggaaagcggcaagcacccggcgcagcagcgtctgattctggaagagctgctggcgcataacctcagcatgctggcgctgcgggcaggcgcccagcgctatcacgccctgccgctcggcgccaacgataccctgaaaaaccaactgctggcctccctgccctttaagcccaccggcgcgcaggcgcgggttaccgccgagattgaacacgatatggcgctggacgtgccgatgatgcgcctggtgcagggcgacgttggctccggtaaaacgctggtcgctgccctggccgccttgcgcgctatcgtccacggcaaacaggtggcgctgatggcgcccaccgaactgcttgccgagcagcatgccaataacttccgcaactggttcgaaccgctgggtattgaagtcggctggctggcgggcaaacagaaaggcaaagcccgccaggcgcagcaggaggctatcgccagcggcgaggtgcagatgattgtcggcacccacgccatcttccaggagcaggtgcagtttaacggcctggcgctggtgattattgacgaacagcaccgcttcggcgtgcatcagcggctggcgctgtgggagaaaggtcagcagcagggattccacccgcatcagctgatcatgaccgccacgccgatcccccgcaccctggcgatgaccgcctacgccgatctggacacctcgattatcgacgagctgccgccaggccgaactccggtgaccaccgtcgccatccccgacacccggcgcagcgatattatcgaccgcgtgcgcaacgcctgtacccatgaaggtcgccaggcctattgggtctgtacgctgattgaagagtccgatctgctggaagcccaggcggcggaagccacctgggaagagctcaaactggcgctgccggagctcaatatcggcctcgtccacgggcggatgaaaccggcggagaagcaggcggtgatgcaggccttcaagcagggcgagatgcatctgctggtagccaccacggtgattgaagtcggtgtcgacgtgcctaactcaagcctgatgattatcgaaaacccggaacgtctgggtctggcgcagctgcaccagctcagagggcgcgtcgggcgcggcgcggtcgcttcccactgcgtgctactctataaatcgccgctctccaaaacggcgcagaaacgtctgcaggtcctgcgcgacagcaacgatggtttcgtcattgcccagaaagacctcgaaattcgcggtcccggcgagctgctcggcacccgccagaccggcaacgccgaatttaaagtggcggacttactgcgcgatcaggcgatgatccccgatgtccagcgcattgctcgccacattcatgaacgctatccgctgcaggcccaggcgcttatcgagcgctggatgccggaaaccgaacgctattccaacgcgtagcgcgcttttgccgcgctgcgggcaacttttctacacaacgagtggattatgaaacgagaactggccatcgaattttcgcgtgtcaccgaagccgccgcgctggcgggctataaatggctgggccgcggcgataagaataccgccgacggcgcagcggttaacgccatgcgcattatgcttaacctcgtcaatatcgacggcaccatcgtcatcggcgagggcgaaatcgatgaagcgccgatgctttatatcggcgaaaaagtgggtaccggcaagggcgatgcggtagatatcgccgtcgatcccatcgaaggcacccgcatgacggcgatgggccaggccaacgccctggcggtgatggcggtcggcgataagggctgcttcctcaacgcgccggatatgtatatggaaaagctgatcgtcggcccgggcgctaaaggcgctatcgatctcaatctgccgctggaagagaacctgcacaatatcgcccgcgccctgaacaagccgctgggcgagctgaccgtcaccgtgctggcgaaaccgcgccacgacgcggtcattgcccagctgcagcagctgggcgtgcgcgtgttcgctattcccgatggcgacgtcgcggcctctattctcacctgcatgccggatagcgaagtcgacgtactgtacggcatcggcggcgcgccggaaggggtggtttccgccgcggtgatccgcgccctcgacggggatatgcaggggcgcctgctggctcgccaccacgtgaagggcgataacgaagagaaccgccgcatcggtgaaaatgagctggcgcgctgcaaaaccatgggcattgaagcgggcaaagtgctgcgtctggatgaaatggcgcgcagcgataacgtcgtcttctccgccaccgggatcaccaaaggcgatctgctggacggcatcacccgcaagggcaacatggccaccaccgagacgctgctgatccgcggcaagtcgcgcactatccgtcgtatccagtcgattcattacctcgaccgtaaagatccggacattcagcagcacatcctgtaataccgctttttctctcccaggcaaccgtccgcaggcggttgccctgttcttcgtttatatttgatcaatagagctttcttgcgccttcggggtggaaatctggctcgtctggaccgaagataaggcatcgcttggcaacaggagaagacgatggcggactgggttagcggcaaagtgacaaaagtggagtactggacggacgccttgttcagtttatacgtgcgggcgcctgttcatccgtttaccgccgggcaatttaccaagctcgggctggaaatcgacggcgaacgcgtgcagcgcgcctactcctacgtcaacgcccccggcaatcccgacctcgagttctatttggtcaccgtcccggaaggcaagctgagcccgcgtctggcggcgctgaagccgggcgatgaagtcctggtggtgagtgaagcggcaggtttcttcgtcctcgaggaagtaccggattgcgataccctgtggatgctggcgaccggcactgcgctggggccgtacctgtcaattttgcaggaaggcaaggaccttgagcgctttaataacctggtgctggtccacgccgtccgctacgccgcggacctgagctatctgccgctaatgcgcgaactggagcagcgctacgccggtaaattacgcatccagacggtggtcagccgcgaaaccgtggaaggctcgctgaccggccgggtgccgtttctgattgaaaccggcgcgctggaagaggccgtcggcctgccgatgaccaccgacaccagccatgtgatgctgtgcggcaacccgcaaatggtgcgcgatacccaacagctgttaaaagagacccggcagatgaccaaacatctgcgtcgccggccaggccacatgacggctgagcactactggtaatcaggcgtccgctttccagcgcacgtcctgggtctccttgccgaacttattctcgccctgggtgccgacaaacgcccccaggtcgatcagcatcatgacgataatcagcgtcggcacaaagcgcccgacgccccactgccagacctgcggcaacatcgaccagttccccgccagcagcatccacgccagaaccatcagcagcgcccacagcccggatttgccgcgatcgtgcagccgcttgaccaccaccgccgccgtcggccacagcaggcagacgataataaacgccgccgtctgcaggttgagcagattgctgcctgccagggtaaacagggcgctcatggtcaccagccagatggcaatccagatccagaaatcgcggcggccaatgcgccctttaattgagaataaccactgctgtagggtcatgcgtttttccttatcatcatcgtctgcgtagtttaccctggcgtcgtgactttttgacaagcgccgcgcttcccgatttaatcgtcagcaggcaaaaaaaggaacgacgggcatgaagaagtggacaattttgtggttaagtgggctgatgggccttaccgtcggcccgcacgcgttgtccgcagagagcgaatcgacgaccgcggcagcgccctacctgctcgccggcgcgccgagctttgaccagtcgatcagtcagttccgcgagaaattcaacgccgataacccaaagctgcctctgaacgaattccgttccatcgccaccagtcgcgatcgggctaacctgacccgcgccgccagcaaaattaacgaaaatctctatgcctccaccgcgctggagcgcggcacgctgaagatcaaatccatgcagatcacctggctgccgatccaggggccggagcaaaaggcggccaggaccaaagcgctggagtatatgagcgccatgatccgctccttcgtgccgacttttagccaggcgcaaagccagcaaaaactgcagaaactgctggccgccggcaagggcaagcgctacttcgccgataccgaaggcgccgtgcgctatgtggtggcagatcatggggaaaagggcctgaccttcgccattgaaccgattaagctggcgctatctgaaacgctggaaggtaacaataaatgacaaaaagcaaagcctttccagtgacgagtctctatactgtttcacagaccatgctgccctctggggcggctatattccttaattcgcttaagtagcgtggagaattaaaatgcgacatcctttagtgatgggtaactggaaactgaacggcagccgccacatggtaaacgaactggttgcgaacctgcgtaccgagctggctggcgtaagcggctgtgcagttgccatcgccccgccggaaatgtatctggacctggctaagcgcgcggcagaaggcagccacattcacctgggcgcgcagaacgttgacgtgaacctgtccggcgcattcaccggtgaaacctccgccgaaatgctgaaagatatcggcgcgcagtacatcatcatcggccactccgagcgtcgtacctaccacaaagaatccgacgagctgatcgcgaagaaattcgccgtgctgaaagagcagggtctgaccccggttctgtgcatcggtgaaaccgaagccgaaaacgaagcgggcaaaacggaagaagtttgcgcgcgtcagatcgacgccgtgctgaaaacccagggcgctgccgctttcgaaggcgtggttatcgcttacgaaccagtatgggctatcggtaccggcaaatcagcgaccccggctcaggcgcaggcggtgcacaaattcatccgtgaccacattgctaaagctgacgccaaaatcgctgagcaagtgatcatccagtacggcggttccgttaacgctggcaacgccgcagagctgttcacccagccggacatcgacggcgcgctggttggcggcgcctccctgaaagctgacgctttcgcggtgatcgttaaagcagcagaagcagcgaaaaaagcgtaattcgcttttcccggtggcgacacgcgaccgggttgactgacaaaacgtgggagcccggcttagcacagcgcaagccgggctttcttttgccgttacagtttccccaacagctgataccaggcgtagtccagcggcagtaaaatcagataactcaccgccgccagcgccagacacagttgcatccccgccctcgccgggaccttgcctaaccccatcgccaccacgatcggcgacgcctgatagggcagcagcggcgtggaatagcccagcacctgaatcataatcacgcttagcagcgggaagccggtggcgtcggcaaagctctgggcaaaggtggtatacagcgccggcacgccgttggcggtcataataaagttcagcgcgctggttatcccggtcagggcgagaaagctggtgaaaggattgtctttatccaggggcatcacctgcagcagcgcattgcccaccgcgccgccaatcccggtttgggtgacggcgatcgccagccccagaatcccggcgacgtaaatgcaggtgcgcatattcaccccgctggcaaactcctcgccgttaataaagcccacccgcggcagcagcgtgatcacagccgccgccaggccggtccacgccgggccgacgccgtgccagctctcggtcacccatagcgagaggaccaccgccagcagccacgccagacgtttctcgtcgcggctcatcggcggcagcggcgccaggtcgcgcggtggatgcggcttgccgggaaacagccagcaaatcagcgccaccagcaccgcccctttcagccagccaagcaccggcgtatgcagcagtaaatagggaacataattcagatggataccgtacgagccttccgccgcgccactcatcaccagattcggcacgttggcgggcaaaatcgtcgccgacagctgaaaggtgccgaaccccaccgccagcgccaggccgaaccagccgcggctaccgtcggcaatgcccgcgcggcgggccatcgccgccacgatcggcatcagcagcgcgatgcgccccatgttggagggcatcacgaacgccagggcgtagctcaggagtaccacgctggcgaccatccgcggccaggagtcggtgagcctggccgacagcgcctgcgccgcccggtccgccagtccggttttacggatggcgatgccgagcacaaagccgctgaacaccagccagaacgccgaagaggcaaagccgccgaagatcacctccggcggagcgattttcgccatcatcgccgctgcgaagaacagcagcgcggtgataaattccggcagcagcgacgtcgcccagagcacgatggtgacgccgacaatcaatgaaggaaggaacagcgggtgggtaagccagagcgacatgcctgtctcctgtcgtttttttcagcaagaatacgacgacaggtaagacaggtaaacgccagaactagtggtttgcgttaaggatggcgcagcgatgatcctgaatttcttccgctgaagcccggttcagggtcagcaggttacgctccgtcgccagcagcaccagcgagccgtcgctctgttgcgccattgccagcgcgaagcgtcccatatgctggcgcgcctccggcacctcttccgccagcatcaggaacgggctacgctgggccagctccgcctccgtcacccggcgcgccaggtattcgtggccctgaagcccgcccggtagcggcaaccagcggctgctgatcgctgcggcatccttatctaactgcgcgcgcacatcggggcgcaggcaggagatatgaatatggaaatggttttgcgtacgtccactgcgcgagttgatcgccagcgataccgcgttatcaggaaccggcgcgccgtggcgctggctcatgatttcacgcccctgccaggcctgccagaaaaagttcggcgtcaacggatccagcagcagcgggctttcggtgccgttgatgcggtaggtcggcatcagcaaatattgcagcgggccgttacggtctttaaacagcacatagccgcccttgaggttcacttccgcgcacggcgacgggttttgctgctgttgctgatggggtacgcactgctgcaggacaatcttgcgtaatgcgtccgggttgccagagtgcagccagtagtagccgcccgccagcgccgcgaggatcgccaccagcagcgccagcaaaaagtatcttactcttctcattttcattccctgttaagcctgaagcggaagagtagcgtaatttgatgactaaatgaaaacagatggtggacggggcgttgtcccgggtggcggctgacgccttacccgggctacgcaccgcgcaaaactatagccctgctaagcgtagcgcaagcagggacaagagaattaacgctggctaatctggtcgaaggtgccgccgttggagaagtgctctttctgcgctttcgtccagccgccgaactcctgatcgatggtaaacagcttcagtttcgggaattcgttagcatatttcttcgccacattcggatcgcgcgggcggtagaagttcttcgccgcaatctcctggccttccggcgagtagagatacttcaggtacgcttccgccacctgacgcgtgcctttcttatccaccactttgtcgaccaccgagacggtcggctcagccagaatcgactcactcggggtcacgatttcaaacttgtctttgcccagttcgttggttgccagcagcgcttcgttttcccaggcgatcagtacgtcgccgataccgcgttctacgaaggtattggtcgaaccgcgcgcgccggagtccagcacttccacgtttttatacagcgccttgacgaattcctgggctttcgcctggtcgccgtgattctgatgcagggcatagccccaggccgccaggtagttccagcgggcgccgccggagcttttcgggttcggggtaatgaccgacacgcccggtttgatcagatcgttccagtcatggatctgtttcggattgcccttgcggacgaggaacacgatggtggaggtatacggcgcggagttatccggcaggcgtttcagccagtttttatcgatgcggccgcgttcggcaatagcgtcgacatcgtaggccagcgccagcgtgaccacatccgcttcaataccgttaatcaccgaggtcgcctgtttgccagagccaccatgcgactggcggatcaccacgttgtcgccggtctcctgcttccagtgtgcgctaaacgctttgttgtactgttcgtacagctcgcgcgttggatcataagatacgtttaatagctgaatgtcttttgccagaacgctggcggatgccagcaacagagttaaccctacgccccacttattcatcgcaccgctctctttatgtgtgttgtgatgggttaagcgtgccagaaagcgattcaatgattaaagaataaaaaaagattggctataacttgcggatataaagacgcgagtaaggatgaccccctcccgggcgggagagggcgcgaagcgattagacttcttccatgcgacccagcagcgcctgcagacgttcctgccagccctgctgctgctctttcagctggctgttttcgcgctccagctcttcacgaccatgctgcgcgctctgaacttcctgcaccagggtgttgttcttttctttcagctcttcgatttccatctgcaacagagtgatggtatcaatcgcctgctgaaccttagattctaatttctcaaacacttctaatgacatcgtcatacctctcctgaacttgcaaggcgttgatagaaactcgtgtttcgtatacgcggtcccgccttaacgaaaattagcgcacatagcggtgttatcgtcgattgtatgaatccccgccgcccctgtccagcggcaagccgcgtagattgcggtttgcaacacttttcagtctttacctggtgctttcagcgcagttcgctcgtagttcatgggtcaatgttaattttatggttaacaaaatgcgtggtgaaacgctccggcagcgctctcgatgcgcgcaaatggcgcgaaaacgctcattttcttgacgagacacacacatttgaagttcgatatttctcgtttttgctcgttaacgataaattaacactatgcctacatggcaatatggtcgtctgtgaccaccctacatacaataatcatcaccacgcttcaggattcgattatgagccaaacatcaaccttaaaaggccagtgcatcgcagagttcctcggtaccgggttgttgatctttttcggcgttgggtgcgtggctgcgctcaaggtcgcgggagccagcttcggacaatgggaaatcagcatcatctggggtctgggcgtcgccatggcgatctacctgaccgccggggtctccggtgcgcaccttaacccagcggtgactatcgcgctgtggctgttcgcctgcttcgaaggccgcaaagtggttccttttattatttcgcaattcgctggcgccttttgcgctgcggcattagtttacgggctttactacaatcttttcctcgattatgaaaccacccaccatatgattcgcggcagcgtggaaagcctcgatctggccggcattttctccacttacccgaacccgcacatcaattttgtgcaggccttcgcggtagagatggtgattaccgctatcctgatgggcgtcatcctggcgctgaccgacgatggcaacggcataccgcgcggcccgctggcccctctgctgattggcctgctgattgcggtgattggcgcctccatgggaccgctgaccggcttcgccatgaacccggcgcgtgacatcggcccgaaagccttcgcctggctggcggggtggggtgacgtcgccttcaccggcggcaaagatattccttatttcctggtgccgctgtgcgcaccggtggtcggcgcggcgctgggcgcattcagctatcgtaagctgattggccgtcacctgccttgcgacacctgcgtggaggaagagcaacagagcccctcctcttccaccgctcaacataaagcttcgctgtaatctgactacgggacaccgactatgaccgacaaaaaatatatcgttgcgcttgaccagggcactaccagctcccgggccgttgtgatggatcatgatgccaatatcgtcagcgtctcccagcgagaatttgaacagatttatcctaagccaggctgggtcgaacacgacccgatggaaatctgggcttcccaaagctcgacgctggtcgaagcgctggccaaagcggatatcaactccgatcagatcgcggccatcggcatcaccaatcagcgtgagaccgtggtggtgtgggagcgagagaccggtaaacccatctacaacgctatcgtctggcagtgccgccgtaccgcggagatctgcgagcagctcaagcgtgacgggatggaagagtatatccgcaaggccacaggcctggtggtggacccgtacttctccggcaccaaggtgaaatggatcctcgaccatgtcgaaggttcccgtgagcgtgcgaagcgcggcgagctgctgttcggcaccgttgacacctggcttatctggaagatgacccagggccgcgtgcacgtcaccgactacaccaacgcctcgcgtaccatgctgttcaacattcacgacctcgactgggacgacaagatgctcgacgcgctggacattccgcgcgccatgctgccggaagtgcgcaagtcttccgaagtgtacggccagaccaacatcggtggtaaaggcgggacccgtattcctatcgccgggatcgccggtgaccagcaggcggccctgttcggccagctgtgcgtcaaagaagggatggcgaaaaacacctacggcaccggctgctttatgctgatgaataccggcgaaaaagcggtcacctccacccacggtctgctgaccaccatcgcctgcggcccgcgcggcgaggtgaactacgctctggaaggggcggtgtttatggccggcgcgtctattcagtggctgcgcgacgagatgaagctcatcagcgatgccttcgactccgagtacttcgccaccaaggtgaaggataccaacggcgtatacgtggtacccgcgttcaccggtcttggcgcaccgtactgggacccgtatgcccgcggcgcgattttcggcctcacccgcggcgtgaactccaaccacattatccgtgcgacgctggagtccatcgcctttcagacccgcgacgtgctggaagcgatgcaggctgactccggcattcgtctgcacgccctgcgcgtagacggcggcgcggtggctaacaacttcctgatgcagttccagtccgatatcctcggcacccgtgtcgagcgtccggaagtacgcgaagtgacggcgctgggcgcggcctatctggccggtctggcggtcggtttctggcagaatctggatgaactgcaggagaaagcggtgattgagcgcgaattccgcccggggattgaaactactgagcgtaactatcgttacagcggctggaagaaagcggtgaaacgcgcgttagcgtgggaagagcacgacgaagcgtaagattgtgaagttattcccggcttgcggcgtaaacgcctgagccgggctacaaaaccccaaacagcacgatcttgtagcccggacaggtgcgcagcaccgcttccgggttttttatcaaccaaacatcggcagcagcaggtacagcttaatcaccagcgcgttgacgatatcgataaagaacgcccccaccatcggcactaccaggaaggccatatgcgatggcccgaaacggtcggtaatcgcctgcatattggcgatcgccgtcggcgttgcccccaggccaaacccgcaatgcccggctgccagcaccgcggcatcgtagtttttgcccatcatccgataggtgacgaacaccgcatacagcgccatcgccagcgcctgcaccgccaggataataatcatcggcagcgccagcgaggccaactcccacagcttgaggctcatcagcgccatggcgaggaacagcgacaggctgacgttgcccaacaccgataccgcgcgatcgaacacccgatacaaccccgccagcgccaggctgttgctgaggatcacgccgataaacagcacgcagacgaaggtcggcagctcgaagacgctccccgccagcagttgcgcaaccaccttgcccagcgtcagacagatggcgatcagggcgatactttcgatcagcaccagcgaggtgatcacccgccccacgtccggcttttcaaaggcggttggcgccacctgatcgtccggtgtcccgtccggtgaggaagagtgcttcaccagataacgcgccaccgggccgccgatcaggccgcccagcaccaggccgaaagtcgcgcaggccatcgccacctcggtggcgttggcaaaaccgtagcgctcaacgaacagcttactccacgccgccccggtgccgtggccgccggataaggtaatcgacccggccagcagacccattagcggatccagccccagcagcgtcgccatgccgataccgagggcgttctgcagcagcagcaggccaaccaccacgatcaggaaagtgcccagcaccttgccgccggcccgcaggctggcgaggttggcgttaagaccgatggtggcgaagaacgccagcatcagcggatctttcagactcatatcgaaatcaatttcgatatccatgctttttttcagcgccagcagcgccagcgccaccagcagaccgccggcaacgggttcaggaatagtgtatttcttaaggaagggaacggtttgtacgagttttctgccgagtaacagcacgagcgttgcggcaacgagcgtcgataaggtatcgagatgaaacataaaaagctccttatgggcgcatgatccattcacacgcgacgatattcctggtgtctttagcttctcatcatgaggagtcagagggggattttacgcagaacggcggaaaaattgacagaaaaagatattttgtatccttaatgatgcgatttagcatacaaaatgttaattacctcgttgcgcatattcacggtataaatttttatgagcaaacgctggcaaacgtttgcttttggtctacagtccgataaaattcccgctttgccaccttgggattgcttgtgatgtccgttaacaccgcagagtcagaaaatgcgcaaccggttgcgcataaaccagccagcgaattaatctaccgcctcgaagatcgcccgccgctaccgcaaaccctgttcgccgccttccagcacctgctggcgatgtttgtcgcggtgatcaccccggcgctgttaatctgccaggctctcggtctcccggcgcaagatacccaacatatcatcagcatgtcgctgttcgcctccggcgtcgcctctattattcagatcaaagcctggggcccggtcggctccggactgctctccatccagggcaccagcttcaactttgtcgccccgctgatcatgggcggtaccgccttgaaaaccggcggcgccgacgtccccaccatgatggccgccctcttcggcaccctgatgctggccagctgcaccgaaatggtcctctcccggatcctgcacctggcgcgccgtatcattaccccgctggtttccggcgtggtggtgatgattatcggcctgtcgctgattcaggtcggactgacctccatcggcggcggctacgcggcgatggccgaccacacctttggtgcgccgaaaaatctgctgctggcgggtatcgtgctggcgctgattattatcctcaaccgccagcgcaacccgtacctgcgcatcgcctcgctggtgatcgcgatggctgccggttatctggcggcgtggttcctcgatatgctgccggctaacaccgcgcctaccaacagcagcctgatcactatccctacgccgctctattacggcctgggcatcgactggagcctgctgctgccgctgatgctggtctttatgatcacctccctggaaacgatcggcgatatcaccgccacctccgacgtttctgaacaaccggtctccggcccgctgtatatgaaacgcctgaaaggcggcgtactggcgaacggcctgaactcatttgtttccgccgttttcaataccttcccgaactcctgcttcggccagaacaacggcgtgatccagctgaccggggtcgccagccgctacgtcggctttgtggtcgccctgatgctgatcgtcctcggcctgttcccggcggtgagcggcttcgtgcagcacatccctgagccggtgctcggcggcgccacgctggtgatgttcggcaccatcgccgcgtccggcgtgcgcatcgtctcccgtgaaccgctgaaccgtcgggcgatcctgattatcgctctgtcgctggcggtaggcctcggcgtgtcgcagcagccgctgatcctgcagttcgccccggactggctgaaaaacctgctttcctccgggattgccgccggcggtatcacggcgattgttctgaatttaattttcccgccagaaaaggcgtgatctcatgcgttcccggtcgcgcatcggccgggacgtcctccaaccaccagccccatcacggaaataaaccacgcctgccttgagaagtgcgcctaaatcgggcataacacggtgatgtgcatctcacagaatggaagaccatgaaatttcttggaaagctgattctctggctgctagtcgctctgctgctcgtcattattggcgcgtggttcctgctgcaaacccactggggcgcccgccaggccagcgcctggctcagcaatggcaccggctggcaggtctccttcgatgagatggagcacgatttctcctccccctttcatgtgcagttgcgaaacgtcacctttggtcgggaaggcaagcctgccactttggtggcaaaaacggtcgacattggcttcagcacccgccagtttagcgatccgctgcatgcggatgagatagtccttaacgacggcactctgaatctgtcaccccactctgcagacctgccgttcgctgccgaccggctgatgttgcgcaatatggctttcaacagcccggaaaccggctgggcgctcagcgcgcagcgcgtcaccggcggcgtcagcccatggacgccggaggcgggcaatgtgctggggaaaacggcgcagatccagatgagcgcgggctcgatgacgctcaatggcgtcgaagccagcaacgttctgattcagggtaagattgatcagggcgaggtcaccctctccaccctcggcgccgatgtcgcccgcggcaccttaaccggcaatgccaaacgcagcgccgatggcagctggcgggtggataacctccagctcaacgagattcgactgcagagccccgcctcgctggccgagtttttcgcgccgttaaccacggtcccctctctgcagattggccgcctggacatcaccgacgcccgcctgcagggaccggactgggcggtaaccgacctcgacctgagcctgcgcaacctgacccttagccacggcggctggcagagtgaggacggcacgctgtcgatgaacgccagcgaatttatctacggctcgctgcatcttttcgacccgatcctcaatgccgaattctctccccagggcattgcgctgcgccagttcacttcgcgctgggagggcggcatggtgcgcacctccggcaactggctgcgcgccgggaacgccctggtgctcgacgacaccgccttcgccggactggagtacacgctgccggcgaactggaaacagctgtggatgacgccgctgccagcctggctgcaaagcctgacgctgaaaaaattcagcgccagccgcaatctgatcatagatgtggaccctgctttcccgtggcaaattaccgccctcgatggctatggcggcgagctacagctggtgaaaaacggcagctggggagtatggaacggcagcgcgacgctgaacgccgcggcggcgactttcaaccggatcgacgtgcgccgcccatcactcaaactgaacgccacagcctcgacggtcaatatcactgagcttagcgccttcaccgagcgcggcattttgcaggccaccgccgcggtatcccagctgccgcagcgccaggtcaatctgagcttcagcggccgcggcgtgccgctgaatattctgcaggcctggggctggccgtcgctacctataagcggggatggcaatctccagctgaccgccagcggcagcgtgcaggccgatgccccgctcaaaccgacgatcaacgggcagctcagcgccgtgaatatggagaaacagcaggtggcgcaaatcatgcgcaacggcgaggtcagccccgcccccgccgcgccagcgcccgctcccgtcaccccatagcgatgcccattccctctcctctatggggagagggattgcttcccggcaaaactccactctgactactctctccctttcagggagagagttggggtgcgagtcctgaaacctgtgcgcaatacgcggctatctgtacctatttagcgcaacaggttcctttcaaatatcagagttgctataaccaaatcactggaagtcgataaaaaaccgctccctgtacctacaaaaatataaaaggatcaatcatgcctgaaatacgtcagcgtattctggagaatatgcaaaaattctcccgggccatgatcggcgccgtattgttcttgccggtcattggcttaattctggccctcagttcagtattaactaatccgacattaattgctgaaaccagtttcttacatcagcttgggcaaatgctcggcgacaccttttggcctttatttggcaacctcggcttattattttgcgtcggcatcagctatggcctggcaaaggataaaaaaaccgaagtcgcactggtttcagtgatgtgctttattatgtttcttggcgccaaccactcctggctggaacacacccatggactcgccggaaaaattaacggtgaatattatggcaccgggcaaacccagctgctgggctttgtggtggtggatatgggcgttttcctgggcattattctcggctgcacgattgcgtgggtgcacaataaagtctctgccattgagctgcctggcgcgctgtcgatgtacggcggcgccaagctgacgctggtggcgatgacgccggtggttatcttctacgccatcgcctttacctggatttggccctttatgacccacggcatctccgccctcaccggttttatgaaaaatgccggggtcgccggggtcttcgtctatggtttctttgaaaaattccttatccccaccggcctgcaccatttcgtctggtcccccttccagctcacccagattggcggcacgctgaacgtggatggtcaggtggtctccggcacccaggccatattcctcgcctatatgcgccatcccgacctgacgccggtcatgaacgacgcattacgtttttcgcagcaagggatgaccactatctttggcctggcgggcgcctcgctggcgttctaccacaccgcgaaaccggagaagaaagcgatggcgaaggcgattctgctgccggcgattatcaccttgatgctgaccggcatcaccgagccgattgagttcaccttcttatttgtctcaccgctgctgtgggtgatccacgcaacgttaaccgccgcctcgcaggccatttgcgacatattcaccgtacgtccctggggagcatcgggcctgatcgagtttctgatctataacctgccgctgccggtctccttaacgcgctggccgggctatgtccttatcggtatcggccagttcgccgtctactacgtgattttccgcaccctggtggtgaagctgaacctgaaaacgccgggccgggaagatgacgagaacgtgaagctctacagcaaagcagagtaccgccagaaagtcgcgcaaccgcagtcggtcaccgatgacattatccgcggcctcgggggcaaggagaatattctctccgtcgataattgttttactcgcctgcgcgtggccgtgcgcgatatggcgcgggttgatgacacgcaattaaaaaataccggcgccaacggcgtcgtacgcaatcgaaatgaagttcaggttatttatggcgtcaaagtgggacaggtacgttcccgggttgataactggttagcagaaaattaatgaggagtatttatgaaattaaccgtattaggcgggggcggcgttcgctctgcatttttagcgaaatctctggcctataacgctcaccgcattggtttaacagaagtcgtttttctcgataactctgctgataatctggcgatatttggcgaaattgcccgctatgtatttaataccattcgcccggatattcagtttagtaccaccaccgacccggtcgcagcgctgcaggacgccaactatatcattaccaccctgcgggttggcggcgatgaaagccgcattcgcgacgaacgaattgcgcttgagcataacactctcggccaggagaccaccggcgccggcggtttcgcgatggccatgcgctcgatcccggcgatccttcgctattgccggctgatcgaagaacatgccgccgaagacgctattctgtttaactttaccaacccgtcaggtctggtgacggaagcgattattaagtccggctttaagcgccggatctatgggatctgcgatgccccctccgagctgattcgtgaactgccggcgatccttggctgtgaggagcgcgacctcagcgtggaatgctatgggctgaaccatttctcctggtttacccacttcaccgtccgtggggaagaggtgaccgaacggctgatcgccagcccggaactgtaccagaagacggcgatgcagtacttctccccggagctggtacggctttgcgataatcagctcctcaatgaatatctctattattactactatcgcgacgaggcgctgaaggcgattcagggggccggcgagacgcgcggagagcagatcgcccgcatcaatcaggagatgcgcgaggcactgcgcaccgtggatgccagaacgcaaccggaggccgccttcaccatctggatgcagcattacctacgccgggaaaatagctatatgcagaacgaatcccggcaggagaaattccacacccgcgaaccgctgacgctgcgccagtttatcgaagagccggacaccggcggctatgccggagtggcgctggatatcctggaagcggtgaacagcaccaccactaagcggatcgtggtgtcgatccagaataatggcacgctcgattttttacgcccggacgacgtgatcgagatcagctgcgacctgagcagggatggcctcaaaccggtgacgccggtgaaggtaccgacggcgcagaagaatatgattgcctgcgtgaaggagtatgagcggctggcggtggcggcgatcctgcagcaggataaatcgctggcggtgcgggcgctgatggcgcacccgctgatcggttcctattcgctggcgaaaaccctggtcgaagcctatctcgacgatgagcagttcgccacctggcggtaatccgctgccgatgggattcccccgctcgcaccgcgcttagcgggggctaactattgctacgtagactggtaaaccacatcttcaatagtcgctcaaagcctaagatgcagtagccgaaaaacgggttgctccagtaaatatcatcatcgaacttctgcgggtcgtgaataataaacgccgtatccgcggcctgcgccagcgggctttggtagtcgccggtaaagcagaccagattaatctccttcccctccagggccttaacccagttgagcgccgagctgctgcgcccggatttagaaatgatccagatggagtcgaagcaggcggcgtttttctgttcgaggatttcgtaatcgggccacagcgccaggctggcattcacgccggtgacgagaaacttgttgtaaatatactgggcgatcagctgtgaaaagccgctgccgtggatcaggatgcgctgctggttaaggcttgccagcagcggcgtcagcgcttcttccggctgaacgctcatgtagtcgatatcgttggtgacatcgagcttcggcatggtgatattgaacttgatgaaatagaccagctccagccagccgctgaacttcagtttctttgccagccggaccagggaagaggggttgctgtagcactgttcagccacagcgcgaactccctggcggatacactgctccgggtcgttctgaataaagcgcagcacggtcatttccgttttgcttagcttcacgtcacgaaagatattttctacgtccatggcgggctcctctcagcggcagaatacgctaacaccgttcgacaaccgcgtctgcggcctgagtcaccacaatgaaatgaacgttactttttgtacaaaaatggaataaaaaaaccctctccgcctggcgaaaagggctgctgctgttaacctatttacaacgtaatcgtcagcgtattgccctcggcgctcactaccaccccccattcgctaccggtctgcgtaccgccctgcacgcccgcgacctgcgggatattgcgcagacataacgtccagccgcgggcctcgccttcgccgctcacggcgatggcgttaccctggcgcctggccttcagggtgaagatcgtcgagccgtctgccgccggaacgtcacagcgtgcctcgcgtccatcctcaaggtgaaacagctggaaggcggtgccctcatgccaggcgtaatccggcttctggtcattgttgcccagcgccagcaggctgttgtcgcgaacgtagaccggcaggctcagcgcatcgtgatgctgcttatgccagcggctacccggcaattcatcgttatgccacagatgcgtccagtgcccttccggcagataaaactgcacttcgccggcctcggagaacaccggcgccaccaggaccgaatcgcccagcatatactggcggtcgagatagtcgcaggccggatcgtccggaaactcgagcatcatcgcgcgcagcatcggcgtgccgcactcgttggccagcgccgcctgacgatagagatacggcatcatgcggcatttcagctgtgtgaagtggcgcaccacgtcgcaggactcgtcatcgtaggcccatggcacccgataggatttgctgccgtgcaggcggctgtggctggagagcaggccgaaggcgcaccagcgcttgtagacgtgggccggcgcggtgttttcgaaaccgccgatatcgtgactccagaaaccgaagccggacatgccgatcgacagcccgccgcgcaggctttccgccatcgattcgtagttggcgtagcagtcgccgccccagtgcaccgggaactgctgcgcgcccaccgaggcggagcgggcgaacagcaccgcctcctgctcgccgacggtctctttcagcaccttccacaccagctcgttatagatgaaggcgtagtggttgtgcattttctgcggatcggaaccatcaaaccactggacgtcggtcgggatacgctcgccaaagtcggtcttgaagcaatcgacccccatcgccaccaggccttttagtttgtcagcgtaccactggcgggcttccggattggtgaagtcataaatcgccagccccggctgccacttatcccactgccacagcgaaccgtccggacgcttcagcagataacccttctctttcagctctttgaacaccggcgagcgctgaccgatgtacgggttgatccacacgcagaccttcagccctttcgccttcaggcgcttgatcatcccttccgggtccgggaaagttagcggatcccattcaaaatcgcaccactggaaggccttcatccagaagcagtcgaagtggaagacgtgcagcggcagatggcgctcagccataccgtcgataaagctattcaccgtcgcttcgtcatagttagtggtgaacgaggtcgtcagccacagaccaaacgaccatgccggcggcagcgccgggcggccggtgaactgcgtatagcggttaagcaccgctttcggcgtcgggccgtcgatgacgaagtactcgaggtattcgccttcaacgctgaactggactttagagactttctccgagcccacctcgaaggagacgcgctgcggatggttgaccagcacgccgtagccgcggttggtcagatagaacgggatatttttgtaggattgctcggtgctggtgccgccgtcctcgttccaggtttctaccgtctggccgttgcgcaccagggcggtaaagcgctcgccgaggccgtagacggtttcgccgacgccgaggtcgaggcgctcaaacatgtagttgcgctgggtcttactatcctgcacgtagccgttgttttttagctggctaccggtgatacgcaggccgtcgcgcagaaaatccagcccccagaattcgcctttagtcacccgcacgctgaggctgccgcttttcagctcggcgaacccggccgtattttctatttcgacatggacgtctttctgcacgttcagcggatagtgcgggccgttatccagcgcaccctggaagtgctccatacgcacgccgattatcccttcctgcggcgagaaaaagcgcagggtgaacaatggcgtatccagctgccaggcgcgttcgcggacatcgcgcggcgcggcatagaccaccatttcattcccctgctgctccacctcgtaaacctgtacgggttggatcaggttgagccctggttgaatgagccagtttccatcactgattttcattaaaacgtcctcttagttttgccattctttgtcgatcggggcggcggtgaaatcttgttcgttgcgacgcgcgccctcggccagctcggccatcatttttttcaggaacggcgttttcagcgtgtagtagcgtttggcgatcaccgcgctcagcaggtagcacaccgccggaacgagggtgaacaaggcgataatgatggtgagggtggcgctgttctgggttttagcggcggcgtcatagccgccgccggccagcatccagccgatcagcgcgccgcccagcgccagccctaacttgagcacaaacagggtaccggcgaagctgatgccggtcaggcgtttgccgttacaccattcgccgtagtcgacggtgtcggacatcattacccactggattggcgtcaccagctggtgcagtacgccaatgacgaagataaagacaaacatggtgatttcggcgtccatcggtacgaagaacatcgccacgctgagcaccgccaggagggcgttggtccaccagaagacgctgactttgcatttccagtcggtcagcggtttcgccagcgccgagccaatcaaattgccgacgcagtaggtcgtgaggaaggcggtgaacagcgccgccgagcccatgatccaggtggtgtagtacatcatcgcgccgccgcgaacgcagaccgcgaggatattgaggatggtgagcacgccgaccacccgccactggtcattgcgccagatatcgcgcaggtcttcacgcatcgaggtactgctcggcggcgcttcgacacgctctttggtggtaaagaagcagaaggccagcatcaggaaggcaatcaccgacagcaccgcgatgcccccctggaagccgagcgctttgtcttcgccgccgataaagttgaccagcggcatcatcagcacggtggagagcatgccccccgccgtcgccagcacgaagcgccaggactgcagcgaaatgcgctgcgtcgggttgtcggtgatcacgccgcccagcgcgcagtaagggatattcaccacggtgtagagcagggtcagcagcgtgtaggtcacggcggcgtagatcagcttgccgttgtggcttaaatccggcgagctgtaggccagcacgcagacgaggccgaacgggatagcgccgaagaggatccatgggcggaacttaccccagcggctgcgggtacggtcggcaagcagacccatacacgggtcggaaatcgcgtccagcgcgcgcgccagcaggaacatggtgccgacaaagccggcggggataccaaaaatatcagtgtagaaaaacatcatgtacaacatgacgttatcaaaaataatgtggctggcggcatcacccatgccgtaaccaattttctctttgacggacaaaatgtgatctttcatatgcgcactattcccttagcggcaccgagggttggtaccggttacggtttttgtaaacctttgccgcactaagatgaattgcgatatctcgttatcagattacgtttcttgttttctgtgatcgcggtagggaatcagggagtgaaaaagtgtaactcacggattttgtgaggatttgtccaggactgttctgtaaagtccagttttaacagtaaaaaagtgcgtttaggtatgtggtaaacggctgaaagtagctataatgcgccccgcctccatgtagcaatcgaggcgcggaagatcgtcatctccggtgaggtggctggacttcaaatccagttggggccgccagcggtcccgggcaggttcaactcctgtgatcttccgccagtttgcccctgctcccccacagccactccctaccaacctgagccccccaactcatcatcacagccaatcattttcatccaaaccctgcgttattttgtctctcgcaaacccgttacactggcgcggtggccgcgtgccgttaccaaccgaaacaggagagccataatgacccccgaactcagacactgtttttccattaccatccgggttgataaaccgataatcgtctcccgcagcccgcagaccggtaagcgccagctgatcccgattgtcggcggcagcgtctcgggtcaacttcgcggccacgtattacccggcggcgtcgacagccagataatcgaacccgacggcacctgcaggctgtccgcccgctatgccctgcaggtggcggaaggcacggtctatgtggaaaacaatggcatccgccgggtgccggcccagtatcatgaccagcttttcgccgacgatatgcgcttttttagcgatattccgcctgaagccatctattttcgcaccgtgcccacctttgaggtggatgctcccgcgctcagctggctaaccacctcgctgtttatctgcgccggtggccggacccaggatggggtgatgctcgacttctatcaggtgggctgattttcactttctgcatataactgttattgccgttagcccgtttttcccctcccggcagcggtctacgatggctccatcttttcattcacccgaatcacagaccggagcagttatgaaagctatcgccattactcaagccgccgctgacggcaacaacatcccttctttaaccgagatcgacctgccgatccccaccgcccacgggcgtgatctgctggtcgctgtgaaggctatctcggtcaatccggtagacaccaaagtgcgcgccggctttcagggcgacacgccgcgggtgctgggctgggacgccgttggcgtggtgcagtccgtcggtgaggaagtgacgctgttcgcgcccggggacgaggtctggtacgccggcgcgctgggccgggccggcagcaacagtgaatatcagctggtggatgagcgcctggtggcgcacaaaccgcgcaccctcgataatgcctccgccgccgcgctgccgctgacggcgatcaccgcctgggagctgctgtttcaccgtctcagcgttgaggaaggcggcaatgcgggcgacacgctgctaatcgtcggcgcggcgggcggcgtggggtctatcctgacccagctggccagtaaactgaccgccatgacggtgatcggcaccgcctcgcgtcccgagagccagcagtgggtccgcgaggcgggcgcgcaccatgtgatcgatcacagcaagccgctcgccgacgagctggcgcgcattggtatcacgtcggtaacccatgtcgccagcctgaccaataccgagcagcacttcaacgcgctgatcgacgccctcgccccgcagggcaagctggcgctgattgatgacccggagaccctggacgtggtgccgctgaaagcgaaaagcctgtccctgcactgggaatttatgttcacccgttcaatgtttgagacggatgatatgatcgcccagcatcagctgctcacccgcgtggcggcgctgatcgacaaccacactatcaaaaccacccttggcgaacactacggcgccatcaccgccgccaatctgcagaaagcgcatcgccagctggaaaccggacgcgccgtcggcaagatcgtgctggaggggttttaagatgatatcgcttatcgccgtgctcaaggcgaaaccgggccaaacggacgccctgcgtcaggccctgcaggcgctgctcctgccgacgagacaggagccgggcaacctcgactatgccctgtttcagctgcgcgacgcgccggacaccttctatatgcgcgaggcgtggcagggacaggacgccctcgatgcccatgtcgcgatgccctattttcaggcgtttatgacgcagatggagtctctgctggctgagccgctgcggctggactttctgacgccggttgagccttagcccaccggctgacgaggggtgggaaaatcacgcccctccgccgcgcgggtttaaaagtgggcgggaagcgtgcgggttatcttttccagcaccccgcgatggaccgtaatgtaaccacctttgcgcagctctgccagaatcgacataacacggctgcgcgacaggttggtgcggcgctgtataaagcttaacgcgttaatttggcgacgatattcctccgggtagtccgccaactctgttagcagggttcgcaccatcggataagaatccacccccaccatctcctgcgaacgcatgctcaacaccatcagccgctgcgccagaacatgggccatctcctgccacaggttttgcgcattgaggatctcgaccgcggcctggtgtcctatccagcgtccgcgcaaatctgtctcagcaaacagagagcagtggtgtttttccggaataccgttaaagacgccgtaaccatcgattaatcccaatagcgaaggggcaaatatcgttgatatcaccatgttgttttccgcatggcatagcgaggcaatcccctcttcgagcagaattaatccggattcagcctgggtcggcggaaaacgataataggtcgatcgcggcagcgcaaagggtgagctggcgggcaggaacgcagataacagggattccaccgcgaataacggctttgtctgtcttccgtaataaaaagacggtaacgcctggtcagtagagaggctggctgcagggatcgacatggtttttatgccatcaggtcaggttgaaaaagtgattcgttgagaatcatagtatcaacaggtgaaataacgaataaaagacaagacgttacggggataaaaagagtgtaagcatcattatctgcaataactatttatctctattctacaggaataaataatactatatgccgtaaatacctataaggcttagcggcgataaagataaggccatcttattatttactgcgctggttaacgccgcgcctgagggtttctctaccgctttccccctcgcatctcggccagtccaggctacgcttatcgatgccactgaccacccgcattcccctcccgttctattgagtccattcatcaagaagaggtttcgctatgctgatcaacgctattggtacctactccgccagccagccgctggaatcaatggccatcacccgccgcgacccggggccgcaggatgtacagatcgccatcgcttactgcggcgtctgccactccgatctccaccaggcgcgatcggaatgggcgggaacgctgtatccctgcgtgccggggcatgaaattgtgggtcgggtgaccgcggtcggcaacgccgtctcgcgctacgccgtcggcgatctggtgggcgtcggctgtatggtcgatagctgtcaacagtgcgaagagtgcgctgagggctggaaaactactgcgaccacatggtgctgacctataacgggccgactcaggacgcgccgggacacacgcttggcggttattcacagcagatagtggtcaatgaacgctacgtgctgcggataacccatcccgaagcgcagctggccgccgtcgcgccgctgctgtgcgctgggatcacgacatactcgccgctgcgccactggcacgtcgggccgggtaaaaaagtcggcgtggtcggcatcggcggcctggggcatatggggatcaagttggcccatgccatgggggcccacgtggtggcctttaccacctccgaatccaagcgtaatgcggccagagcgctgggcgccgatgacgtggtggtgtcgcgcaacgacgacgaaatggcggcccacgtcaaaagcttcgacttcatcctcaacaccgtggcggcgccgcacaatctcgatgccttcaccacgctgctgaaacgcgatggcaccatgacgctggttggcgccccggccacgccgcatccgtcgccggaagtgttcaatctgatcttccgccgccggtcaattgccggctcgatgatcggcggtattccggaaactcaggagatgctcgacttctgcgccgaacacggcatcgtcgccgatatcgagctgatccgcggcgatgagatcaacgaagcctgggaaagaatggtcaagggtgacgtgaaataccgcttcgtgatcgacagtgcgaccctcgccggctaagcgccgcgacgaaaggtacgccgccattccgtcgggctgacgccaaagcgcgctttaaactgctggcgccaggtgaccgctgaaagatagcccaccgcctccgccacctgctcgaccggcagatcgcccgcctcaagcagagtctggctgcggcgcagacgttcggcggtcagccagtcggtaatgctcatcccggttgcccgggcgaagtggcgggtcagggtacggcggctcatcgccaccacccgggccagcgaatcgagactgtgcggctcggcaatatgctgctgcagataatccagcaggcagttgattcgcgcatcgcgggtgtttttcggcaccggctgggcgataaactgcgcctggccgccctcgcggtgcggcgaaacaatcatccgccgggcgatctggttggccgcgaggctgccgaaacgctggcggatgatgtagaggcaacagtccagcgccgccgcggtgcccgccgaagtaatgatccgctggtcgtcgacgtacagggcgttgatatccagcagcacctgcggaaaccggcgctggaaatcctgctcgaactcccagtgagtcgccgctcgcctgccgtccagcagcccggcgtagccgaggacgaacgcgccgaggcacaggccgacaatctccgcgccgttatcccgggcccgcaccaggctatcaagcagcgcctgcggcggacgtcgatcgacctcgccccagtaaggcaccaccacgatatccgcctgttccagcgcgtcataatcgccggtggcgtacagcgcaaaaccatcgcgggcgcgcagcagccccggccgctcggcgcaaatgtgcagattaaagcgtttgatttccgaaaccgaatcgccaaacagcatgcaggggacggcgtagtgaaacgggctaaagccctctacagcgacaatcgccacgtcggtgagtttcatcgtcctttccccttgcgcatgttaataaaccacggtttccccatcctgcgggatactcaccacatcggcaatctgattatccagcgcatactggcgcatctcttcccggctcaccagacagtggttgaccgcctcgaggtggatagccatgattttcgcttccggcagggtgaagtgcacgttcaggagatcttccttgcccatgataatcgggccaaagccgatgacgtgggcgtagccggcgttgaggaccaccacgtccgggcgcagcttcagcaggtcggctgcaatgtcatcgcgccagatagtatcccccaccagccacagcgtcttctcctgcggatggcgaaacaccacgccgcaggcctcgcccaggcgttcagccatcgccggcaccgcgtaggtgcggtcgctgccatgctgcccggaggtggttttcagcagacgcacgccggcaaattcgctgtctgccgacagcaggcgcagatcctgaaatccctggctgcgcagcagcgcggcgtcggcctcatgctggacgaacaccggcagggttttcgggatcgcggcgatcgctgccgcgtcccagtgatcgtcatgggtatgggtgacgatcaccgcatcaacgtcgacaattttatcgcgggaaaacggcagctcaaccagcggattgcgcagttcgctgcgcgcggtgcccggaaaacccggccaggcgcctttgtccgccagcatcggatcgatgagaaatcttttcccggcgtagtgaataatctgggtcgcattacggatgtgggtgatgttcatgttggcgttcctctggggtcatctgacgaacatcgtactgagtccccgcctggctcaacaggggcgtttgggcaatgatcgatgaaatcgggccaacctgcggcggttgccatccgcctccggctatgttgttcttaaggctcaatttttgacaggagtggcaggatgaaaaagaaactgaccgccgccgatatgcacgacccgcaggtcatcgccgagacgccgtggttcagcatgcgtaaggtgggtattgatgtcgcccccggcgagcgccgcgacttttattccattcattacccgcgcccggcggtggggattgtggccatccaggatgagaaagtgctgctgattcgccactaccgctacctgatcgataaggtggtgtgggcgatcccctctggcggcgtcgatgaagaggaagacccggcggtcgccgcgctgcgcgagctgcgggaagagaccggctggcaggcgcaacgcgttgaggagatcattcgctttaacccctcctacggcagcagcgatcagctgtttatcacctggctggccaccggtttacgctgggtggggatggatgcagatcaggatgaggtgatggagaccggctggtttaccttcgacgagataaaccaactgatcgcccgcggcgagatgccggacgggctgtcgctggtgccgctgctgcagctgatggcgcagcggcgaagcggctcgcttacggcttaagcatccgccagcggaaccacagctgggccacgaggatcagcacgccgccgataatcttctgcagcggcagctgttcgccgtaccacagcgcggcggcaatgaccgtcagcagcggttcgagcaccatgatgatcgccgcgctggccaccgccgcgtacttctgccccttcatctgcagaccgaagcgcaggctggtggcgatgacaatgctggccaccagccagccgagagtcggcagggtcatcggctggtcccagcgttcaacggcagcggagatggtcaacccgacgataccggtgatcgccagctgcacggtggtcagggggatcagcggtacttcacgcgcgcagcggctggtgtaacagaaccagatcgactgcaccagcgccgtcagcaaaaaccagccctggctggggtggaaggctatcggcatatgcagactgagcagccccaggccaaccaccgcaatcggcaggcactcccaccaggcgcgcggcgggcgcaccttcatcatcacccatgcggtcagcgggacgaacatcatcgacaggctcatgataaacgccccttcgccgagcgacgccgtcgtggagaccgaatagatccacaggcagaggttgagcgcaaaccagagtccgctgatgatgagttttggccagtgctgcttttgcgggcgaaaaccgcggcagaacggcagcagaagcagcgcggcgaagaaaaaacgcagcccaagaaacgcgaacaccggcatgccggcgatcgcctcgcgggaaaatatccagccgcaggcggcaatcaccgtcgcggcaatcagcagcaggtcagcctgccgttggcgtaccatacgcgcctctccctgtgtgttggcttaccagccaggcaccgcgccgccgttgaagatagtctctgccgccttcgccacctccggcgactggtacgactgcataaactccttcacgttttgcgcgtctttattgtcttcccgggtcacgatgatgttcacgtagggcgagtttttatcttcgataaagatgccgtcacgaaccggcgacagcccggtttgctgcaggtaggtggtgctgatgatagccacgtcgactttgggatcgtcgagtacgcgcggcagttgcgccccttccagctccatgatcttcaggttatgcgggttgtcggtgatatccaccgccgtcggcagcaggccggtcccggctttgagggtaatcagctcctctttttgcagcagcagtagcgcccgcccgaggttggtcggatcgttggggatagcgatcgtcgcgccgtctttcagttcggcgactgacttgatcttgcgcgaatagccggccatcgggaagacgaaggtattcccgaccgccaccagatgataattatgcgctttgttgtcctgctcaaggaaaggccgatgctggaagacgttggcgtccagatccccggcgttggtcgactcgttgggcagcagtgagccgctgaaccccaccagctcgacctccagaccgtacttctctttggccaccttcttcgccacttccgccacatcctgctcggcgccgttaatcacaccgaccttaatgtgcttcgcttcattacccttttggtcgcagccgaccagcgccagacccgccagcatcactgcggcggcggcccgtaaacgtaatctcatcctcttcaccctgtctgtcctgaatgtcattgttttttttcgtgcaaaactatagcgactttcgggtcgggtaataaacagcaaaccacgcaactggaaataaaatcatcttcgcgaaacgcgaggcgctagccccgtcgccactcgcccggtgtcacgccatagcgcattttgaagcgcttcgagaaggacgccagcgactgaaagccgcagcgttcggcaatgacctcgaggttggtctgacgctccaggcgcagcagccgggcggccagcgccattcgcaactgcgacagccacgcctgcggcgtcaggtgatagacgcgggcaaaatgacgggcaaaggtggcccgtgataaaaacgcgcgggcggccatactctccagcgtccacggttgctccggggtcgccatcaccgccagcaccgccggcatcaggcgttcatcgctcatcaggcgcagcagcccgccgggcggctgttgctcgccaagcagcatgcgcagcaggagcaccagcagcgtatcgccgaggctgcgcacgatagcgctgccgccgggacgctgcgccaggctctcgcgcaccagtatattaagcagcgcgtccagctccgggcagtcttcacgcgcatcggtatggagatggatcagcgtcgatgcttcactgaacagccagctgacgtgcggaccaaaatagaattcgccgcacagcatctccagcgccccctccgccgggccggcgcgcatttccgtcaccgtgccgttaaaccggtgcgccaccggcagcacctggccccactccaccaggctctccatcagatgcggcgaaccgtgcggcaggaggacgacatctcccgcgcgcaggtgatgggtctggccgccgacgttgagccgcccctcgccgcgcagcaccacgtgccagggcaccacgccgctgcgcatttgctggtgcccggcctgccagcggccgccgaagcgacagtgcaggttcacttcgcagcgcggcgccagcagcgccagcagatgactgagactgtccatgcttctcctgagacgataagacaaaaaggtgagacgaagaccgccagtctagcatgcggcaagcgcctaagatgaccccattgccaacacaccctcgataacaacaggagttaaccatgagccgtttagcagatatccgtgaacaagacgccaccggcaaagccgccgatattttcgccgggatcaaaaaagcgatgggcaaagtgccgaacgcctacctgaccatcggcggccactcgccggcggcgctgcagcaggcgctggcgcacaatgcgatgctccataaaggcagcctcagcgcccaacagctggaggcgattaatctgtcggtcagcgaagccaccggctgtgactactgcctggccgcgcacaccctgatggcgaaaaaagccggcttcagcagcgagcagatccacgccctgcgccgcggggagtatgcggaagagatgcagcttgatgcgctggtgaaattcgcgcagaccctggtgaccaccaccggtacgctgccggaagccgacgtcgccgcgctgcgcaacgccggttttagcgaccagcaggtgattgagattatcagcgccatcagcgccatcctgttcaccaacatggtgaaccgggttaacgacacggtagtcgacttcccgaaagccgattaatccgtcgcgcagcgccggttttacagccccagatcgctgagccccggatgatcgtccgggcggcgcccctgcggccagtggaacaggcgctcgctttcggcgatcggcaggtcgttgatgcaggcgtagcgcgtctgcatcagtccatgcttatcaaactcccagttctcattgccatacgagcgaaaccagttgccgctgtcgtcgcaccactcataggcgaagcgcacggcaatgcgattctcctgccatgcccacagctccttaatcagccggtattgctgctccttgcgccattttcgctgcaggaactcaacaatttgcccccgaccgtggacaaattcgctgcggttgcgccattcgctatccacggtgtaggccagggcgactttttccgcatcgcggctgttccagccatcttccgcggcgcggaccttctggatagcgctgtcgcgggtaaacggcggtaacgggggacgttgttcggtcatgcttactctcctctacgggctaattgctgctgcaggcgctgattctcctgctccaggtcatgaatacgttgctgcaggttctggctgtactccgccacctgctgcgcgctgtagcgcggcgtaatgtgctgcgggcagttccagtcaaacgcctgcaaatgaaaaagaaacagacgttcaatgcgggcgcgatagttggccggcgccacctgcgccagcagctgcgggtggtcctctgccgccaggacctcgacggtggcgtagattttcagcctggcacggcgcggataatccatcaaaaacaggcaggcccggtcgctgccgcgcagattgccggtagtaatgtactggcggttaccgccgaaatcggccatcgccagggtgatgtcatccagcagatgcagaaaccccggcgggccgccgcgatgctgaatgtagggccagccgctctgcgacaccgtcgccagataaaagctgtcgcgggtggcgatcatccccgcttcgctgtcgccgaagcggtcggcctggcggcgactgcgcggcgtttgccacagcgagtcgctgcccatttcatgctgcacatccatcacgtccggggtgatagcgatatcgagaaaggttgctgccatagcgcctcctgttgtctggcgccatcatggactgtactgtgaagaatgataatacgggtaaattggcaatcatctttccgcaaaacgggagaataatggatcgattaaacgcgatggcgctgctggtgaaagtgaccgagctggggagcatgtcggcggcagcgcgggcgctgaatatgccgttgaccaccgtcagccgccatattggcgaactggagagcgcgctgggcgtacgcctgctggcgcgaaccacccgcaaactgacgctcaccgacgccggggtcgattatgtcgccgccgcgcggcggatccttgaggaggtggaaaacgccgaacgccaggcgacgggcgaatatcaggaaccgaagggcgagctggtgatctccgcgccgacgatgtttggacgccagcacgttcttccggtaatcagtgaatttatcgcccgctacccgctaattcgcgtccgtttgctgctcagcgatcgcaatgccgacctggtgagcgaccatgtcgatctggcggtgcggattggcgacctggcggacagcagcatggtggccacccgcctcggcaccatgcggattgtggcctgcgcccatccggcgctgctggcgaaatacggcgagccgcagcggccacgcgatctggcggcgctgccgatcatccgcattgaatcgccgatgccctatcgcggctggcgctttcgcgccgctgagcgcgaggaccagctgattaacctgccgccggtgctatccgtcaccacgccggagagcgccgccgatgccgcgcggctgggggtgggggtggcccgcttactgcattatcaggcgctggatggcctgcgccacggggagctccgtctgctgctggaaaacgtcgagccggatccggcgccggtccatttgctgtataccgctcgggatctggcgccgcttaagctgcgcaaatttatcgattttgccgcaccggcgctgcgtcaggcactgctgcgcatcgccggggccgcttaatgcgtcgcggtcttcagcggcgcctcctttaacagccatgagaggacaaacgccaccgccataatgccggccgccatcagaaacgccgcgtggatcgccgcgccgaaggcgtcgaggtagtcgaggcggatatccgcgggcaggtgctggaccgccaccggattcattcccggcggcagcaccgcgccttccggcagcagttgttgcaggttgctctgcagcacgtgcgtgaacaccgcgccaaacagcgccacgccgatggagccgccaatcgagcggaacagggtcacgccggaggtggcgacgccgtacatctgcgccggcatcgcattctgcaccgccaggaccagcacctgcatcaccagccccagacccgctcccagcacgccggtaaacaggtacagctgccacagcggcgagtgaatggtgatgcgggtcagcagtaccatgccggtcacgccgagcagggtgccgaggatcggaaacaggcgatatttaccggtacggctgataatccgcccgctgataatcgaggtcagcagcaggccgcccatcagcgggattaactgtaacccggcctcggtgggcgtcgcctccttcaccacctgcagatagagcggcaggaaggtgactgacccgaacagcgacatgccgatgacgaagccgatcaggctgcacagcaggaagctgcggttgcggaacagcgccagcggaataatcggctcggcggccatccgttcttcgtaaataaagccgatgatccccacgatgccgaaggccagaatgcaccacagctgcgggtcattccacgcatggacgctgcccccttccgaggtaaacaggatgatgcacagcagcgccatgctgagataaatcgcccccagccagtcaatctgatgctggctgcgtttattgctgctgtggaataccgcgccgatcaccagcagcgcgaacaggccgagcggcaggttgatatagaagatccagcgccaggaggcgtgctgcaccagaaaaccgccgatcagcgggccgatcaccgtcgccaggccgaaaacgccgccgaacagcccctgatagcggccgcggttggcgggcgggatgacgtcggcgaccgccgccatgctgatcaccatcaggccgccgccgccgagcccctgcaggccgcgcatcagcaccagttgggtcatattctgcgccagcccgcagagcgcggagccgacgagaaacagcccaatcgccacctgcagcacgattttgcggccgaacagatcgccaaatttaccgtacagcggcaccgcgatggtggagctgaggatataggcggtgaccacccaggaaagcttgtccagcccgcccagttcgccgacaatcgtcggcagcgcggtggagacaatggtctgatccagcgctgaaagcagcatcaccagcagcaatgcgctgaacagcaggcgtatcgactgcaccggtgggttagcgacttgagaagtcattgcaacgctcgcttgaaattaattaaatgcataattaatatttagtgaaagaatgagtcgggtcaagagatcgccatatcatgacagcacaaaaggatcaggatgctccccgccgcccgggtcggccgcgcggtaaaaaaccgggtaccgccaaccgcgaacagttgatggacatcgccctgacgctgtttgcccgcgacggggcgggccgcgtatcgttgaacgccatcgccaaagaggccggggtgacgccggcgatgctgcattactacttcagctcgcgggatgcgctggtgactcagctgattgaggagcgctttatgccgctgcgcaatcacatcagccgcatctttgtcgatcatctacaggacccggtactggcgctgacgatgatggtcgagacgctggcgcatatggcggagaaaaacgcctggttcgcgccgctgtggatgcaggagatcatcggcgaaatgccgattctgcgccagcatatggatgcccgcttcggcgaggagcgttttcaggtgatgctggggacggtgcgtcgctggcagcaggaaggcaagatcaatccggcgctggcgccggagctgctgtttaccacggtaattagcctggtgctggtgccgttttcgcgcattcacagcgatccgcgtttacaggcggtcaaccgtcagaccatcatcagccacgcgctggcgttaatgggccacggcgttggaggttaaggcgtggttttgacgcttttgtagtccggataagacaccatgggccgccatccgggattttccctgctcgcactgcgcttagcagggctaccactcccgtgttatgtccgggcagattgcgctcccgatatttcttctgcgctatgtctcttatggcgcagggagcgcacagggggcggccagtcgccgccgccccctgtacccccgggctccggccagcaaaatcgccgctacgcggtcccttcgacttatccctgcaggcttcgggtcgggccgaggcagcgtccgtgcaaaacacggccctcagcccgcatccatgcgggctgccccggccttccgggaacgtctcagcgattttgaggccgccagcaccggcagtttcagtcgcgcaagagggtatatcaataacaggccgctcggaacgtaggccggataaggcctttatgccgccatccggcacaaccacaggtgcggtacctgaccgcccggggataccaggatcgttacagcgccttcgacaaatagtggcgctgcatgcctgcgtgcgggaagtcgggcagcgacatctgcagctgatagcctaatttctgataaaacggcagcgcctggaaactaaaggtatccaccagcagatggctgcagccttgcgcctgcgcctgctgttccgcctcctgcatcagctcgctccccagcccgcgcccgcgcgtcgtctcgctaacccacagatactcaatgcacagccagttgcccttgcgtttggcaatcagcccgccctgcattaccccttgcgcatcgcgcgagtaaatccccagatcgccaaactgcgccgcatcgagatactgctgattatactgccgcagaccggcaaacaattcttgttgatcgtcgggattaatgctttttgtaatgattagtgtcattaactatctccagtatcgcgctgccgaatggttattttccctctccactttcacaaaatattcttattttctccatgattatttgccttaattttttgcgttctaaaagtaagcaaaaaaacctttccattatcgcgacggatcgtataatggggaaaaatgagaatgatcattctcaccacaaaaccagaggagatgcgcttttcacctcctgaagaccgaagaggttggcttcagcggagacacaataacaatcacgttcaggaacatctgtgttccttttttgtcattttcgctcacccgaaaatgcttcagcgcccaacctattccctcgtttttaaataaacggggcggacgtcttatatcttgagaaaatataatgaaatacatcatagctcccatcgcgacagcattatttctccttagcggatgcgataatgcgcagacatcagctccgcagcaacccacgccggaagtgggcgtggtcaccctgcaaagccagccggtgccggtagtcagccagctcaccggccgcaccaccgcctcgctcagcgccgaagttcgcccgcaggtgggcggcatcatccagaaacgcctgtttaccgaaggcgatatggtgaaggccgggcaggccctttaccagatcgatccctccagctatcgcgcgacctggaacgaagcggcggcggcgctgaaacaggcccaggcgctggtggtctccgattgccagaaggcccagcgctacgcgtcgctggtcagggataacggcgtttcccgccaggatgccgacgacgccgcctccacctgcgcccaggacaaggccagcgtggaatcgaaaaaagcggcgctggagagcgcgcgcatcaacctgaactggaccaccgtcaccgcgccgattgccgggcgcatcggcatctcgtcggttacgccgggggcgctggtctccgccgatcaggataccgcgctggcgacgatccgcgggctcgacaccatgtatgtcgatctgacgcgatccagcgtcgatctcctgcgtttacgcaagcaaagcctggccagcaacagcgacaccctcagcgtgacgttaaccctggaagatggcagtacctatcccgaaaaagggcgtctggcgctcaccgaagtcgccgtcgatgaatctaccggctcggtaaccctgcgcgctatcttccccaacccgcagcacgtcctgctgccggggatgttcgtccgcgcgcgcatcgatgaaggcatcatgaacgacgcgatcctcgccccgcagcaggggatcacccgcgatgccaaaggcgacgccacggcgctggtggtcgatgccgccaacaaagttgagcagcgtaccgtggaaaccggcgacacctacggcgataaatggctggtgctgagcggcctgaaagcgggcgacaagctgattgtcgaaggcaccggtaaagtggcccccggacagacagtgaaggccgtcgccgtcaacaataacggaggcaacgcctgatgttctcccgtttcttcgtgcgtcgcccggtctttgcctgggtgatcgccattctgattatgctcgccggggtgctggcgatccgcaccctgccggtaggccagtacccggacgtcgccccgccggcggtgaaaatctccgccacctataccggggcgtccgccgaaaccctggagaacagcgtcacccaggtcatcgagcagcagctcaccggcctcgaccatctgctctacttcagctccaccagcagctccgacggctcggtcagcatcaccgtcacctttgagcaggggaccgacccggacaccgcccaggtgcaggtacaaaacaaagtgcagcaggcggaatcgcggctgccgagcgaagtccagcagtccggcgtaacggtggaaaaatcgcagagcagctttctgctgatccttgcggtgtatgacaaaaccaaccgcgccaccagctccgatatctccgactggctggtcagcaatatgcaggacccgctggcgcgcgtggagggcgtcggcagcctgcaggtattcggcgccgaatacgcgatgcgcgtctggatggacccgaccaaactcgcctcctactcgctgatgccttccgacgtccagtcggcgattgaggcgcagaacgtgcaggtttccgccggtaaaatcggcgcgctaccgtcgtccaatgcccagcaattaaccgccaccgtgcgcgcgcagtcccggctgcaaacccctgaccagttcaaagcgatcatcgtgaaaagccaggccgacggctcggtggtgcgcctgagcgatgtcgcgcgggtggaaatgggtagcgaggattacaccgccaccgccaatctgaacggccaccctgccgccgggatcgcggtgatgatggcccccggcgccaacgcgctggacaccgcgacgctggtgaaaagcaaaatcgccgaattccagcgtcagatgccgcagggttacgatattgcctatccgaaggacagcaccgagttcatcaaaatctcggtcgaggacgtgattcagaccctgttcgaagcgattatcctcgtcgtctgcgtgatgtatctgttcctgcagaacttccgcgcgacgctcattccggcggtggcggtgccggtggtgctgcttggcaccttcggcgtgctggccctgttcggctactcgattaacaccctgacgctgttcgccatggtgctggcgatcggcctgctggtggatgacgccatcgtggtggtggagaacgtcgagcgcattatgcgcgacgaagggctccccgctcgcgaagccaccgaaaaatcgatgggcgaaatctccggcgcgctggtggcgattgccctggtgctgtcggcggtgttcctgccgatggccttcttcggcggttcgaccggggtaatctatcgccagttctcggtaaccattatctcggcgatgatgctgtcggtggtggtagcgctgaccctcaccccggcgctgtgcggcgcgctgctcagccactccaaaccgcacaccaaagggttcttcggcgcctttaaccgcctgtgggggcgcacggaggcaggctaccagcaccgcgtactcggcggcctgcgccggggcgcagtgatgatgggcgcttacgcgctgatttgcggggcgatggcgctggcgatgtggaagctgccgggcagcttcctgccggtggaggaccagggggagatcatggtccagtacaccctgcccgccggggcgacggcggtgcgtaccgccgaggtgcgccgccaggtcaccgactggttcctcaccaaagagaaagccaataccgacgtcattttcaccgtcgacggcttcagctttagcggcagcgggcagaacgccgggatggccttcgtgtcgctgaaaaactggtcgcaacgcaaaggggacgacaacaccgcccaggccatcgccctgcgcgccaccaaagagctggggacgatccgcgacgccaccctcttcgccatgaccccgccgtcggtagacggtctcgggcagagcaacggcttcaccttcgaactgatggccagcggcggtaccgaccgtgacagcctgatgaagctgcgcagccagctgctggcggcggccaaccagagcagcgaactgcagtcggtgcgcgctaacgacctgccgcagatgccgcagctgcaggtggatatcgataacaacaaagccgtctcgctggggctgtcgctgagcgacgtgaccgatacgctctccagcgcctggggcggtacctacgtgaatgactttatcgatcgcggccgggtgaagaaggtctatatccagggcgaaagcgacgcgcgcgcggtgccgtcggaccttggcaaatggttcgttcgcggcagcgataacagcatgacgccgttctccgccttcgccaccacccactggcaatacggcccggaaagcctggtgcgctacaacggctccgccgcctttgagatccagggcgaaaacgccgccggcttcagctccggcgcggcgatggacaagatggaaaagctggccgacagcctgccggcgggctccacctgggcgtggagcggcatttcgctgcaggaaaagctggccagcggccaggcgatgagcctgtacgccatctcgattctggtggtgttcctgtgcctggcggcgctgtatgagagctggtcggtgccgttctcggtgatcatggtcatcccgctcggcctgcttggcgcggcgctggcggcgacgctgcgcggcttaagcaacgacgtctacttccaggtggcgctgctgaccaccatcggcctgtcgtcgaaaaacgccatcctgatcgtggagttcgctgaatccgccgtggatgaggggtattcgctctcccgggcggcgatccgcgccgcgcagactcgcctgcgcccgattgtcatgacctcgctggcgtttatcgccggggtgctgccgctggccatcgccaccggcgccggagccaacagccgcgtggcgatcggcaccgggattatcggcggcaccctgacggccaccctgctggcggtgttcttcgtaccgctgttcttcgtgctggtgaagcgtctcttcacccgccaacgtccttctcaggagtaaggtatgtttcgtttaagttttatgtttatcgcgctcctgaccgcgggctgcgtctcgcttgacccgcattatgatcgcccggccgcgccggtgccggccaccctgcccggggcgcacggcgaatcgacggcggtggtcggcgactggcagaaagtggtcaatgacgcgcggctgaaaaaagtggtcagcatcgcgctgaacagcaaccgcgatgtgcaaaaggcgctagccgatatcgaggccgcgcgcgcccagtatggcgaaacgcgggcatcgctgtttcccaccgttgatgccgaactgagccacacccgcagcaaaacggtggccagcggcctgagctccgcttcacaggccgacggcgcggtctccagcttcgaactggacttgttcggcaagaaccagagcctgtcgcgcgcggcgcgcgaaacctggcttgccagcgaattcaccgcgcagaatacccggctgacgatgattgccgatttgaccaccgcctgggtgacgctggcgacggataacagcaatctggcgctggcgcagcagacgatggacagcgcggcaaactcgcgcaacatcgtcgcccaccagatggcggttggcaccgcctccgcgggtgatttaagctcggcggaaagcgtctatcagcaggcgcgcgccagcgtcgccagctatcgcacgctggtggcgcaggataaaaacgccattaacctgctggcgggggaaaccgtgccggagagcctgctgcccggcactctcgagagtctcggggataacagcatcgcgctggtgccggcgggcgtgtcgtcgtcggtgctgctgcgtcggccggacattcaggaagcggagcacaatctgaagagcgccaatgccgatatcggcgcggcgcgggcgaacttcttcccgtcgatttccctgaccgccagcgccggggtcggcagcgactcgctgtcgtcgctattcagccacgggatgcaggtgtggtcgttcgccccctccatcagcctgccgctgttcaccggcggcagcaacctggcgcagctacgctatgcggaagcggagaaaaaggggctgatcgccacctacgagaaatcgattcagagcgcgtttaaggacgttgccgatgcgctggcgcgccgggaaacgctgagcgaagagcttgatgctcagcggcagtatgtcgccgccgagcagacatcgctggatatcgccatgaagagctatcaggccggggtcggcgattatctgtcggtgctcaccgctcagcgcacgctgtggtcggcgaaaacgacgctgctgtccctgcagcagaccgacctcaataaccggatcaccctctggcagtcgctgggcggcggcgccagttaaacttacccgccgggcgaccgagcccggcctctacaaggaatcgttatggcacgtgtttccctctcctgggcgctgatcctcggcctgctgtcgggtatcggcccgctgtgcacggatttttatctaccggcgctgccggagatcactcagcagctgcaggccaccagcacccagacccagctgtcgttgaccgccgcgctgattggtctcggcctgggtcagctgtttttcggcccgctgagcgaccgcattggccgcctgaaaccgctggcgctgtcgctgctgctgtttatcttctcttcggcgatgtgcgccctgacccgcgatatcaacatgctgattgtctggcgctttttacaaggctttgccggcgccggcggctcggtgctgtcgcgatccatcgcccgcgataaataccagggcaccctgctgacccagtttttcgccctgctgatgaccgtgaacggcattgcgccggtgctgtccccggtgctgggcggctacgtcatcaccgccttcgactggcgaattctcttctggacgatggccgccattggcggcgtgctgctggtgatgagcctggcgatcctgcgggaaacgcgcccggccacagcggcgcatgccagccgccaacggcccggccagccggtgctgaaaaatcgccgctttctgcgcttctgcctgatccaggcctttatgatggccgggctgttctcctacatcggctcttcttccttcgtgatgcagagcgaatacggtatgagcgccatgcagttcagtctgctgttcggtctgaacggtatcgggctgatcatcgccgcgatgttcttttcccgtctggcgcgccgctttagcgccgaaagcctgctgcgcggcggcctgacgctggccgtgagctgtgcggcgatcatgctgctgtttgcctggctgcatctgccggtgctggcgctggtcggcctgttctttaccgtgtcgctgatgagcggcatcagcaccgtcgccggcgcggaggcgatgagcgccgtcgacgccgcgcagtccgggaccgcgtccgcgctgatgggcaccctgatgtttgtcttcggcggcatcgccgcgccgctggcgggtctcggcggcgaaacgatgctgaaaatgagcctcgcgatggccatctgctacctgctggcgctgctgctgggcctcagcaaaccgcgcgacgcacgctaatctcctgctgcggtaataaaatattccagatttattaccgcactatttcccgccatatctaccattctcgtattattctccacgtactaatcgtgatactcttcacaggcaaggaataaataattccttatactgcgcgccactgagaataacgaggtttctatgagtatcgacctgagcaaactgctgaccgagcgacgtaacgccaacagcgccaacattgacaccctctccaccctcgagatgctgacggtgataaaccaggaagaccagcaggtagcccaggcgataacgccctatctgccgcagattgccgaggtggtggataaggtcgcggcggcgctgcaggccggtggccgcttgatttacattggcgcgggtacctcagggcgtctggggatcctcgatgccagcgaatgcccgccaaccttcggcacccgcccggagcaggtggtggggatcatcgccggcggacataaagcgattctcagcgccgtggaaaatgtggaagacaacaaagcgcagggggcgatggatctgcagaacctgaacttcagcaaccgcgatgtgctggtggggctggcggccagcggacgcacgccgtacgtcattggcgccatggaatacgcccatagtcagaatgcctttgtcgccatcgtcagctgtaacccgcatggcgaaatggcccagctggcggacgtggcgatcaccccggtggtcggcccggaagtggtcactggctctacccgcctgaaagccggcaccgcgcagaagctggtgctgaacatgatctccaccggggcgatgatccgcgtcggcaaggtgtacagcaacctgatggtcgacgtcgaagcgaccaacgccaagctgattgagcgccaggtctctatcgtgatggaggccaccgactgcgatcgcgccaccgcccagaaggcgctggaggcctgcggccgccactgtaaaacggcgatagtgatggtgctggcggacttaagcgccgcagaggcgcagtcgctgctggcgaaaaacaacggctatatccgcaaggcactcagcaacacctgagcgccgacagacaggtaacgggcaatggcaaaaataacgaaagagatgatagcgcggatcctcgcccacgtgggcggcgccgcaaacgtcgcgcaggcgggcaactgcatgacgcgcctgcgcttgaccctgcgcgatgaaagtctggccgacagcgccgccatccgccagattgacggcgtgatgggggtgatcgtcagcgacgagcagttccaggtggtgctcggccccggcaaggcgcaaaccgccgccgaaatgatgaacggcctgctggaggcggcgcccgccgccgcgccgacgctggccgacgtcgcggcggagaaaaagcaggcgctgaagggcaagcagaccagcgcggtgcagaagtttctcgccaaattcgccaccatctttacgccgctgatccccggctttatcgccgtcgggctgctgctgggcttcgccaccctggcggaacaggttttcgtgctggagaacgcccatccgaacgccagcctggtggcgctgattggctatatgaaggtcttcagcaaagggatgttcacctttctgagtatcctgatcggctataacgcgcagaaggcgttcggcggctccggcgtgaacggcgcgattatcgcctcgctgttcgtgctgggctacaacccggaggcaaccagcggcttctacgccggcatttccaccttcttcggccatggcatcgatccgcgcggcaatatcatcggcgtactgatcgccgctatccttggcgcgtgggttgaacgccaggtgcggcgggtgatgccggccaacctcgatatgatcctcacttcggcggtgacgctgctgatcatgggcgcggtgacctttacggtgatcatgccgattggcggctggttgtttaccggcatgtcatggctgttcctgcatcttaacggcaacccgtttggctcggcggtgctggccggcctgttcctgctggcggtgatgttcggcgtccatcaggggtttgtcccggtctattttgcgctggtggacgcccagggctttaactcgctgttcccgatcctggcgatggccggggccgggcaggtgggggcggcgctggcgctgttctggcgggcgaagcgcgattcgctgctgcgaacccagattaaaggggcgattattccgggcttcctcgggattggcgagccgctgatctacggcgtcaccctgccgcggatgaagccgtttgtcaccgcctgcctcggcggcgcctgcggcgggttcttcgtcggactgatcgcctggctggggctgccggtcggcctgaacacggtgttcggtccgtccggtctggtggcgctgccgctgatgacctccggcagcggaatttacgccgggatggcggtctacgccggcgggctggcggtctcctacctgtgcggttttgtcctcacctggctgttcggcagtaaaaatgtcgatttaagctagaacgcgactatcggttaatgcccggcggcggcttcgccttaccgggcctgcaaaatagttacgccgccgcgcccgactaccatttcctgccccgccgcccgggcgcgcgcatgctatgattcccctttgtcatatttcgcttgaggaaaagatgggctccagcaaaaaagggatgctgaacgtactgattgccgccgtgctgtggggcagttccggggtgtgtgcgcaatttattatgcaggaaagccagatgtcgtcgccgtttctgaccatgacgcgtctgctgttcgccgggctgatcctgctgatgctcggctttgttcacggcgaccgcattttccgcgtgctgcaaaaccgccgcgacgccctaagcctgctgtttttctcgctgtttggcgcgctaaccgtgcagttcacctttctgatgaccattgaaaaatccaatgccgccacggccacggtgctgcagtttctgtcgccgacgatcatcgtcgcctggttcgccctcgcccgcaaagcgcgtcccacaccgctggtgctgggagctatctgcacctcgctggcgggcacctttctgctggtgacccacggcaacccaacgacgctgtcgatttcgccggcggcgctgttctgggggatcgcctcggcgtttgccgccgcgttttataccacctatccttcaacgctgattgcccgctacgggacgctgcccatcgtcggctggagcatgctgttcggcggcgcgatgctattgccgttttacggcggccagggcaccgattttgtggttaacggcagcctgctgttagcttttttctacctggtggtgatcggtacttcgctgaccttcagcctctatctcaacggcgcgcagaagattggcggcgcaaaggccgggatcctcagctgcgccgaaccgctgagcagcgccctgctgtcgctcctgctgctggggatcaccttcacgctgccggactggctgggcactctgctgatcctcgcgtcggtggtgctgatcgccatcgactcgcggcggcgggtgagagccgcctgagcaggcgataaaaagcgcattttcaataagttaaactgaccactatttgcgtgttttcccgcctgcgcatatagttgacggaagcgattacggaaggagaagcctgatgaaagcatgttggatggtatgcctggtcaccgccctgagcgccacgtcggcgtgggccgaatcaccgctgcaaagcctgcagttcgagcagcaaaaacagcaggtgctcaaagcggtgaaggaaaaatgcgcgccagcaagccacctcagcgacaacgattttgccaataaagtgctggcgaccgacggtaacaagaacgcggtccgcgaagcaacgctggcgaaggagcgcaataaccagaaaagctaccaggccgcaatcgacaaaatcgtctgtccggccaaatagcggttatttcagcctcgcgaccagcgttttccagtcaaacggcgtaagctgcctgtagctcaggctacgggcggccatctgctccggcagctggcgctggcttttcgcgatcgcctcgctcattatcccggcgctccccacgtcacgcagggttttcaccacctcctccatctcttcgctgcgccgaatgccatgttccgccacccggctgatcagatagtcggggaacgcgcctgtccagcccagagaggggaaactatgatgcaaggagctaagcacctcctcctcaacgccgtattcacgagccgcgaacaggcattctgtggtaagcgcttcaagacctttgatcatcacgctacggcacatttttatcgccgacacctggcccaccgtactggcgccatagcgggcattcagccccagcctctgcagacgcggcgcgatcgcctccgcctgcggcccgccgatcaataacggtgtctgcaatcgggccggcggtaccggcgccatcaccgcgacatcaatgtaggcgcccggcagaaaatgttcagccgcctgccgtttcgtctccggcgccacggagttgagatcgaggaaatattgtcccggctgcagcagcgcggccgcctgctgcgccacctttagcgcctcaccggcggtcacagtagaaaaaaccagcgtggccccctccagcgcctgcgccagcgaatttcccacctgaacgcgcgaatcacgggctttactgagcattgcctctcgctccgggccattgagcttgcaatcccaaatggtcaccgcatgctcacgggccagatccgccgccagaatgccacccgcctcgccaaaaccaataaacgcgattgtcatcatcactcctcacgcggccagacgcgggccggaataaaaacctctccagcaaacagcagtcgcgctgtgcgtaacaggccgcagccagccagggcgccgtcagcatcaagctgaagcgtcacgctaaattcgcctgtcggatgctcgacgctgagcagcggcgtatcgcctggcgctacctgcgccaggccctgcgcgacagagccggggagcagacaagcgctggccacgctcaccgcgccaaatacgccgatcgacgcgtggcagcggtgggggataaaggtgcggctgctgatggcgccaccgtgtcgcggctcggcgatcagggtcatcttgggcaccgtgcgctggctgacgtcgccaagctgcatcagcggcccggcctgcaggcgaatcgactccaggcgacgtttaagcgcgtcgtcattatccagctgttcgcgcgtctcatagccggtgcaaccgaggtcgcaagcgcgcagcaggatcaccggcattccgttatcgatgcaggtcacctcgacgccgtcaaaacggtcacgaacccggccggtcggcagcagggccccgcagctggagccggcgacatcaagaaaatggagcaggatcgggctggcgctgcccggcacgccatcgatacgactctcgccgacgtagttgaccccgtcggcatcgcaggggatctctgccaccgccagttgccccgtgttctccataaaaatacgcacccgagtgagcggcgcatcgtggcgaaccagaccgcgctcgatggcgaaagggccaacggcggcgagaatattgccgcagttttggccgtaatccacggtagccgccgccacgttcacctgggcaaacagatagtccacatcggcgtcaggccgtgcggagcggcggataatcgccactttgctggtcagcggatcggcgccgccgatcccgtcaatttgccggggatcaggcgagcccatcaccgccagcagcaccgcatcacgtcgcaccggatcggcaggcagatcgtcggccagaaaacaggccgctttagaggtgccgccgcgcatccatagacaggggattccgcgttgcgccatttattcctccacctcgtctgcgcggtcgtaataccgcaggcccttttccgccagacgcggacgcatagcgtaaatatccagccccaactcgccattgcgcatccgctcacgtttcgcaagctcattgctcatgcgggcttccgctttatggagcacatcacggacccgggcgtgaggcagcaccacgacgccatcgtcgtcggccaccacgacatcgcccggctgtacaagctgacctgcgcatatcaccgggacgttaaccgaaccgaggctctctttcaccgtcccctgggcataaacctggcgggaccagacggcgaatcccatttcccgcaacgtttgcgaatcacgaatgccgatatcgcccaccagcccgaccacgccgcgcgattggagagacgtcgccagtagatcgccgaagaagccatcgccgcacggcgaggtcggggccaccaccagaatatcgccggcgcggcactgctcgaccgccacatgaaacatccagttgtcgccaggcgtcaccagcacggttaccgcgttgcccgcccggctaacgccctgctgaatcggacggattgccggccccatcagcccctgacgatcccaggcttcatggagcgtcgccaccccggccgcctcacagcggcgcaaaaccgcctcgtcatggcgcggcaggtggcggatcacaaggccttttttatttaacaggttcatgccaggttctccgttacgcgggggaagatgctctggaaggcttcgccgtgaacgatatcgcgcgcggccgtgatgccgatattgcgcttggcctgcaccccgcgctgcagcgccacgcgggtgtagtattcccacagatgctcctgaccctgcatgcactgaatggcctgatactttttctcccagacggcggtgatgtccagtaacacatcgggtttccagttgcactgctccggctggtgcggttcgaaacagtaaaccgggggagcagcgacaattttctcgccagggcgatagccttctgcctgggcgataatccgtgcttcctgcgccagatgggaggccagcggatgatcgtagttatagggatcctgcagggagtgcgtcaggacaaagtggggctggatacggcgatacacatccgccagacgaaatagcgtctctttatcggcgcgcagcggatagtcgccgatatcaaagaattcgacgctggcgcccaggatcgcggcggcggcctgcgcctcttcgcaacgcacctgcttcaccgcctcctcggtcatgttgcctttacgccacagtttggcggactcgccgcgctcgccaaaggataaacagaccacatggacctgatagccctgcagggcatgcagcgctatcgcaccgcccgcgcgccagacgaaatcggccgagtgggcgctgacgacaagggcacttttttcgctaaccggatgagacatgatggcttcctctgttgtttttttcagcttgtcatgtcccgtcgtggggaggtaattcgttaacttgcgaaggctatgatttttatttatgttgtcgtctcactcactttttcaggcctgacgaacaatgctaaagagaaagcacgataaaattataaatatcatgcagctgcgctttttctgtcaggtcgcgctgcgcggtagcgtctcacgcgcggccgatgacttattccgcacgcagtcagcgataacccgggctattcgcgatcttgaagccgcgttgaacgtcacgctgttcgaacgccattacagcggcatggtgcccaccgagtatggcaagtgcatcctgccgcgcgcccggcgggcgattgacgacctgcaggccatcccggcgctgctgcagaagcaccatacccgcagcagcggcccgctggcggacgccggctggctgttcaatacccgccgcttagccatttttattcagctctatcacgtcaaccatacccaaaccgtcgcgcaacagttggggatcactcagccggcggtcagtgccgcgctgaaggtcctggaaaaaggagcggattcggcgctatttcgccggacgccagagggggtgcgtcccacgcctgccgcggagctactctatcccccggtgagcagagcgctcaacgagctggaaaacatctggagcgatctcgctgcccgtcgcggggtgctggagggcaccgtgcgcattggcgccctgccgctgagccggacccggctactgccctccgccatcgccgcctttctggcccagcacccgggcatcaccctcatgaccaatgaaagcccgtatgagtcgctggtcgccgatatgcgggcaggtaatatcgattttattatcggcgccctgcgccaggatgaagatctcccggacctctgtagcgaagcgttattcgaagaggatatgttgattttactgcgtaataaccacccgctgctgcgccatccggacccgcgcagccagctggcgacagcgcaatgggtgctgccgcgcgccaacgcgccggcgcgcaatttgctggataaggcgtttgtcaccctggggctgccgctgccccagccgacggtggagaccggggatgcggcgatggtgcgaggattgctgcagggctccgacatgctggcggcggtctccgccagccagatgcgttttgaaactgacaatgggctgctcagcgtgttgccggttcccctgcccgataccacccggcgtatcgggctgacgtttcgcgccggcagcctgccctccccggcgacgcaggcgctgttgcgttttatttatcagcaggttcaggacggggccgtttaacgtttacccgccaccgaataggttacctgctggttgcgcgtttgctgaaacgcctccagcgtctgcccgcgcatcgcggcgtaaatatgcaggttggatacgccgaccaccgcgcccattttctccagcaggaagaagctggcgccatactgaattaatccccgccagtcgcgcgcgttgagcaactgctgttcctcctcactcagtccggcttcggcataaagcgactgaggcgactgcagaaaacgttcgcgccaggcaggctcaatcagccgatgcaggaaacggttaagccgcaagccattcaggctgcgctcgtgggtaaaaggataggttcccggcagtttctccaccccggccagctgctgcgccatatgctggcgatggcgcgtcagggtatcgacggggggcaggcgcgcattgttctcaaggatcagcgtggcgataccggtcatcgacggcaggtaatagtcgcgccaggtttcggtgacattggctgatagcgcgccgcgcatcaccagccacatgatcacttcggacccctccatcccccccagctcggcatattcgccaagggtcatttcggtaagcttttccgggtcattaaccagcatatcaacaaactgggcatcccagtcgggattattaaatccgcagcgctcgccatgaacctgatgcgagagcccgccggttgcgacaatcgccacattgatatcttccgggaagctttcaatcgcccggcgcagcgcctggccgagtttgtaacaacggcgcgcgcttggtaccggaaattgcagcacgccgatctgtaacgggatcaccgccgtcggccacccctgcgcttcatcccagggcaacagcgccgaaagcggcgagaaaaggccgtggtcgagctttttatccataaagaacgacatatcaaactcgtcggccatcaggctggcgccaatgtgccttgagagcgccgcgttgccctggaccggcggcagacagcgcggtccgccgccctcatcggcaacgtcatattgactgtcgattcccagcgtaaaagtcgaatagtgatcgaagaaaaaggcggtcacatggtcattaaagatgtacaccagcgcatccggttttttctcctccagccagcgctgcagcggttcgaagctctggaagatcggcgcccacgccggatcctgctgtttatgatgatcgaccgcgaagccgatagtcggggtatgagagacggcgataccgccgagaatgttagccatcagataactccacttatcggtgttcgaggggggatgacaaagcgtcaagttctgcctctgtgagtcgaggcttagcgtgattcatacggtgcaacaaaatacagatccccgccaggcaggccggcagcgcaagcaccaaaaagatcgacgagtgtcccggcactgccagcatcagcatcccgcccagcgtggagctgaggatagccccggtacggccgataccatgcatccagctgacgccggtagcgcggatctcggtttgataataggcgggcgaataggcctgcagaccgttctgcgcgccgttaatgcacatcccgctgataaaaatcagcaccgacagcgccgccgaaccgaaatccatcaccccctgggacaacaggcacaaacagccgaggaaataggttgccgcaatcacggctttcgccgaagcgcgatccatcagcataccgacaaggatcccgcccagcgggccgccgagctggaacaagccggtcatcatcgccgcctgctgcagcgacagcccgccggagcggagaatggttggcagccagccgttcagcaggtaaatcacgaacagccccataaaataggttaaccacagcgctattgtgccgcgggcatagccatgccggaacagctgcgccactttgctgctccgcgtgatgggcggcgcattcagctggaaaacggtttcagccgtaaactggcccccaagccggttaagcgccctggcgatctgctcgcccggtagtcggcgcgccaccatgttcatcgccgactctggcaacatcacgatcataaaggggagcaccacgagcggcagcacgccgccaaaaaccagcgccgagtgccagctgtaatgcgataacaaaccggcggcgataaagccgccgaggccggaacccacgttaaaaccgctgtacatcagggtgatcatcacccctttacgccgctccggcatatattccgccaccagcgtgacgcagttgggcattacggcgccaaggccaaggccggtgagaaaacgcatcagcgccagctgcgtcgggctttgcgccacggcgccggccaggctgaacagcgcaaacagcgccaccgaccagagtaaaattcgctttcggccgtagcggtcagaaagcggacccgctaccagggcgccaatggcgacgccgaacatggccgccccaagaatcggccccatttcggcccggctgatgccccagtcttcgatgagcgccggggcgacaaagcccatcaccgcggcgtcatacccatccagcataatgatgatgaaacagagcagcagcacgttccattgaaagcgcgagaccgggcgggtatctatccacgctttcacatcgacaacgttcgtgtgattcatagggtgacttcctcaagcaggcggtacgaatgttctggttagtgttttttgagtggaactttcgtactcaacttaaggcaggtcacgcaggctgtccggttcgaaaatccggcgtcagatatgagttttatttataatgtgagggatacgacaaaaaccagccagcaaaaaacccgcagccaacggcggcgggtcagggcaagagcagcgtttagtgcttcggaataattaaatcgccgcgcagcgggctgccgcccgggttgtccgttttctcggtcagccagttgacgatccgcgacgccatcgcgtccatggaatattcaatcgccgggatagtcgggataccgggcagctgtaacgatccggcgaggctaaacaccatgacattttgcggaacggcgcggttaaacgcctgcagctgcggcaccacgcgctgcgcctgctgttcatcgctcaccagcagcgcgttaaagttcagcgtcgtggcgttattgaccagctcctgcaccgccaccgacggcgaggtattatccagaaacaccaggttgcgattaaacggcaaaaagtttttttccagcgcgtgcttgtagcccagcagcacctggtcggcaaagccgctgctctgcggatgaatcagcgcaatctgccgtctcccctggctaatcagatagtgacaggcggtttcggcggcgaaagcatgatcgaactgaatactgttgtcgccttcgctatcgaggcagtccaccagtaccacgtccgggcggttaatattcagaggaaaacgcgcgccgatgattagcacgttatcgcacagcccgcaggtcaactcctccagagagttcatcacgccgtggctggtgttggcgaagcgcagcagcaggtgtttctggtgctggctgagctgtttttccagggcgtagagatagctggtggtttggttgatgttgtcctgggcgcagatgacgccgatgcagccggtggactggctgagcaacgactgggctatcatgtttggccggtaattgagcgcttccgccgcctgcagcaccgcctgacgactggcttccttcacgccacgtgagccgctcaacactcgcgacaccgtggctttggaaaccccggcaagtcgtgaaacatcattgattgtcgacatcattttcccctgcgcgggcgccgcgtcccgccaaaatcctgtaaacctgaatcgcttcaattatgaccagcgcagtatatccatttcgccatttgtttggaaaccgattttccatttcagcgcaaaacatcgccaaatcgacagaataatgtgagcgaaatccaataaatccgccctataagcaggagatcttgaccactatcacagttctgctttttataaatggaaaccggtttccgtctgatatcaaatcacccacgcaataactttttacattttgaggatggtcgtcgatgtacaagattatgctgtgctgctctgccgggatgtccaccagtctgctggtcagaaagatggttgaggcggcgaatgaacgtgacctgccggtgcagattgacgcctatggcgtttccgaatttgacatgcagtttccgcagtatcaggtggtgttgcttggcccccaggtgaaatacatgttgaaaaccctgtctgacaaagcggcttccctgaacattcccgttcagcccatcgatacgatggactacggtatgcagcggggagacaacgtcctgaattatgctctgtcgctgatcccagcggcgcactgagaggtgttgaaatgagttctctgtatcagtccatgattgccgtgatcgagcaatctattactccgctggcaggacgccttgggcagcagaaatacgttatcgctatccgcgatggcttcactgccgccttgccgtttatgatcatcggctctttcatgctggtatttatctttccgccgttttcacccgataccaccaacggctttgcccgcggctggcttgatttctcccagcactaccgcgaacagctgatgctgccgtttaacctcagcatgggcgtgatgaccttctttatctcggtcggcattggcgccagcctcggtcgtcagtttcagctcgatccggtgatgtccggtctgctggcgtttatggctttcctgctggtcgccgcgccctatgccgatggcaaaatttccactcagtatctgtccggtcagggcattttcaccgcgctgatcaccgccatctactccacccgcgtttacgcgtggctgaagcaaaacaacattacgattcgtctgccgaaagaggtccccaccggcgtcgcccgttcgtttgaaatcctgatcccggtgctggtggttattgcgactctgcatccgctgaatctgtttatcgaagcgcagaccgggatgatcctgccgcaggcgatcatgcatctgctggagccgctggtttccgcctccgactcgctgccggcgattttgctctctgttctgatgtgccagattttctggttcgccggtatccacggctcgctgattgttaccggcattatgaacccgttctggatggccaacctgtcggcaaaccaggcggcgctggcggctggcacggtactgccgcacgtctacctgcagggcttctgggatcactatctgctgattggcggcgtcggttctaccctgccgctggccttcctgctgctgcgtagccgggccacccatctgcgcaccatcggcaagatgggcatcgtgccgagcttctttaatatcaacgagccgattctgttcggggcgccgatcatcatgaacccgatgatgtttatccccttcgtctgcgtaccgatggtcaacgcggtgctggcttacggcgcgacgcgtcttggctggctgagccaggtggtgtcgctgacgccgtggactacgccggccccaattggcgcgtcgtgggcggctaactggaccctgagcccggtggtgatgtgtctcatctgcatggtgatgtcggcggtcatttacctgccgttcctgcgcgcttatgaacgttccttaatgaaaaccgaagttgagaaagccaaaaatagcgttccggtagcagaaaccgttagctaatccctctccttccggagagataataagatgacagcgtaataatgcagaaaatggactttcactgcattattaaataataaatacctcaggaatacacatgattgaattagaagatgcggtaatggaaattatcgttaatgcgggacagtcacgctcattatgttttgaagcgctgcatgcggcccgaaccggaaatatcgacgaagcgcgcttactcttaaacgaggccgacggctacgcccgccgggcgcatcagatgcagacccagctcatcgggcaggatgccggtgaagcgcgtcagcccatgacgctgattatggtacatgcccaggatcatttgatgaattcgctgctggcccgcgagttctcagaagaattaatccatctgtaccagcgttaattaatatggaataacgttagcgagaatattattctccgacgtcgctgtaccctaaaaaacaaatcagcttattttggctatttattctagccagaatgggatggttattatctgaaatatattaattattaaagcgagataaccatgaatactgtaaaaaaactgcctttagccatggcggtggtcgccgcgctgtgcccaatttctgtcatggcgcaagaatttacgcaggaacagatcgacgccatcgtcgccaaagccgttgataaagcgctggccgaccgccaggcgaaaatcgacgccgcggccgacaaaaaggtcgacgtgatcaccaacccgcagaccaccgccgcctcgccggatatggccattccgttcggcctcaagttcagcggctatgcccgctatggcgctcacttccagaccggcgaccagaaatatgtcggcgtcgacggctcctataacggcgcctcggcgatcggccgtctgggcaacgaaagcaacggcggcgaattccagatcagcaaggccttcaaaagcgcgcagggggctatctgggatctcaacgtgatgttcgaccactggagcgacgaagttaacctgaagaaggcctacgtcggggtcaccaacgtgctggaatccaaccccaacgcctatatctgggccggccgcgacttccaccagcgtccgcaacaggggatcaacgactacttctggatgaaccacgacggccagggcgccggggtaaagaactttgatatcggcggcgtgcagttcgacgtggcggcggtctcgcaggtgaaatcctgcagcccggaagtgatggccgacgagaccaacccgtcgcgcatcacctgtaccggcagctccgacaccggcgacaacggccactacgcgctgaccaccaaaacccacaacatcaaggccgggccgatcgacgtcgaggtgtacgccaactacggctttgactcaaaggcggtggacagcgacgcgcgtctcgaagcctggcagggcggcctggtgctgagccacaccaacgacagcggggtgaacaaggtgatcctgcgctattccgacaactcggataacagcgtctacaacaagaccgacgacctgaccacggtctacgccagcttcgagggcagccataagttcacccagcaggcgcaggtggaatatctgctggccttccatgactacgacaacggcaaagataataccgacaaccgcaaaaactacggcgccatcgtgcggccgatgtacttctggaacgacgtgcactccacctggctggaagcgggctaccagcgcgtggattacgaccagggcggggataaccacggctggaagctgacgctgtcgcagaacatcgccatcggcatggggccggagttccgtccgatgctgcgcttctacgtgaccggcggccaggtggacaacgagcacaccgcgaaggtgaacggcacccaggaccagcagctggattcgctgaacgtcggcgggatgtttgaggcgtggttctgatgcgatagcgttgccgaaggagcgttcccggctggcgctacgcttagccgggctacaactggtgcgctccatttatgccggatggcggcatacatgccttatccggcctacagaaaatcgccttccccccaggaccggcaagcgcagcgccgccgggcagtcagacccgagccctggtggcgtcatcaattctttatctctggcttaatcggcgggcgatacgctcaagcttcatcatcaacagcagcgtgacgcccaccagcacaatggtcagcgccgagccatcggcgatattgccgcgatcggtgaggctgaaaatggtcaccggcagcgtcgtccagcccggcggatagatcatcaccgtcgcccctagctctcccatcgacaacgacaggctcagcgccagcgctgaaatcatccacggcgtcatcagcggcagcgtcacatggcgcaggcgataccacggcgaagcgcccaggctggaggcgacgttttcaatatcagcggaaatacgcgccagcccggtcgttacgttgctgaaggtaaaggccgagatcagcacgaagtgcgccgccagaacgataaagaaggtgccgttcatctgcagcggcccctggctaaacgccaccagaatgcccagcccgacggaaaccgaggggatggcgctgggcagataaaacgccaggccaagatatttctgtagcgtcgcgccatactggcgcagcgccagcgccgcccacatcccgcacagcagcgccaacaggctggcgcagaagcccaccatcaggctcgaaaacagcgaatcccacgccgcgccgcgaaaggcgttaacaaagtgggcaaaggtaaagccggtgggcagcaggccgttccattgtttactcaggctggagagtaaaatcaccgccagcggcagcaggaaaacgccggcaaaaagcgtcaccgccagcgcgcccgccgccgcgcggcctttacgcgaccaaatcaacatcgttaactccttacgccagtgcgcgccgccgccagccgatagagcataaacagccccagcgacagcagaatattgatcagcgcaatcatgcaggccacgctgtaatccgactccagaatcgccttgctgtagaccatcatcggcagggtattgacccctttggcgccaataaacagcacgatcccgaactcgttagtggtcaatagcaggcacaggctgccgcccgccatcagcgccgggagcgccgccgggaagataacctgggtaatcacccgtaacggatgagcgccgagaatactcgccgcttccagctggctcttatctatctgccgcagtcccgccatcaacggacgcatcaccagcggcgtaaagacggtaatctccgccagaatcacgccgttaatcgaatagaggaagtctaccggcggcagttcaaaagcaaacagcgccatcagggtgccgttgagcagccccgccgagccgtaaataaaggtgaatgcgagagtgataagaaaggtcggcagcgcaataaaagtatcaatgacccggcccaccagttggctgccggggaacggaataaacaccagaatcagcgccagcacgctgccgagcaccagacagccaagggtggcgaacaccgcaatctgtaaggtattgagcagcgcgccaataaagcgttttgagtcaatcacctgccagaaggtctcgaggctcaggttgccgctggcgtcgcgcagcgcctgttcggcgatcagcagtagcggatagaaaaacagcgtcgccagcaccagcagcggcaatgccagccacaggtaaggccgtaagtttcgcgccggacgcgcaagcgtgagggtttgcgccatcattgcacctcgatcagaaccgcatcgccaggttcgaagtagagcgccagcttgtcccccgcgcgcggcagcgggttcacgtgggtcatcacaatccgcaccgcttcgccggcaacatcgcacagcagatgcgtcagatcgccctgccagtgtaccgaggtcagggtagcattgagacgattactggttgccgatcgcggcgccaggctcatgtgctgcgggcgaatgcataacagcttgttgttgccatgcaggccgccccggctgaaggcgttaatcaggccgccgccgcagctcacgctaaccagccccggctcggggctgtctttcagcgccgtcgcctgcaggatattggcgcggccgaggaattcggcgctaaagcggttcggcggatagtggtacagctcgtgcgtttcaccgtgggcgatcagcgacccgtctttcatgatgccgattttgtccgccagggtcagcgcttcggtctgatcgtgggtgacgtagagaatggtcagttccggcagttcgcgatgcagacgggcaatctcttccaccatgttatgacgaatttgcgcatccagcgccgacagcggttcatcaagcaacagcacccgaggacgcacggcaatcgcgcgggctatcgccacgcgctgctgctggccgccggaaagctgatgcgggtagcgggtggcgtaatccgccatgccgacgatttttaaggcttcagtcacccgctcggcgataagccccctgggctgcttttgcgcccgcaggccgaaagcaacgttatcttccaccttcatatgcgggaacagcgcgtagttctgcaccaccatcgccagcccgcgtttgtacggcggcaactgggtgacgtcagtatcgccgatcaggatccgcccgccagccggttgcacaaaaccggcaatcgcccgcagcaccgtggttttcccggaaccggaagggccaatcagcgccagcacctcaccgggctcaatggtcaatgacagcggttttaagaccacgttgccgtggtatgaaacgcgcagcgagtccagggtgatcccggacgtccccgccagcgacggggaagaagtgacggtggttttcatcaacatcaggcttactcgctatcggtcactttatgccagcgggcaatgtcagccgacagcgataccgcgacatcatcccagttcggctcccagctcttcacgccgtcgagcgccgctttcgccgccttaaagttagcatcatccggcgctacatcgttgcgtaccggcaggccccaggagcgcgcgctgacgctggattgcgccggtttatccagcaggaaattgatcagctttttgccgttttcgctgttcggtccgttctgcaccagcccgatggtgtagggcagcgccagcgcgctgcgctcgcctttatcatccgccggccagaaaattttaacgttcgggttacgcgccatctgcgacaggttcatctgcagatcgccgttggcgacgtacagctcgcctttgttgaccagcgccgtcagcttaccggtcgaggccgatgggccaacgttattggcctgcagcttgcccagatactcgaagccggcgtctttaccgccgaggctatggaacgcctgcagcatcaccgctgtaccgtcgcccgcctgacccggcgtggagtactgcaacttgttcttaaagcggctatccagcagatcctgccagctggccggcgcggttttcagcaactggccgttatagatgaaggtcagatagttgttcaccagcggcgaatatcggtcgttggcgccggggatctgcgcgctaccttgcggggtaaaggttgccagcaattgctctttggcggcgcgctggataaacggcggcaccgtgaccagcacatcagcctgcggattggtgcgctccttggccagacgctcgacgatcgcgccggagccgccttccacatactgcactttgatgcccgtcgctttggtgaaggcagcgaactggctctgataccagctgttatcgccgtcatgcaggccgtcggcggagtaaaccgtgacgacgccgtccgcccaaaccggagagctggtcagcacgaacagggatagcagagcaagtcgggagagtttcatcgtgtaagcctcatcgcagttagttattctggtgtagaccagatttgccttcacgctaccgatggtttatgacaaaacgatgaaagaagtgtgtcgaaggagttaaaacgagcgggatgcgtagccccggtaagcgctagcgccaccggggagatcaaaaaatttaactaataaaatcaatgggtatcgacttcgatccgcaggctatcatgccgccagtattcaatatcgtaatcgagaatacgcccgtgctgatcgtaattcagcctgcgcaacagcagcgccaggcgcccctccatcacccccagcgcctcggcggcctgcggcggcattgaggtgggataaaacgacagatgcatactggtatagatcagttcgtagtgagtttgataaatctcggtcagactgccgttgagatcgtggcgcagcagctcaggcacccgcgcgggcagacagtggttttcgcagtagcacaccggacgcccgtcggcatagcgcagccgggtcagcaggtagacctgatcgaagggctgcagcgccagaggcgccattacatccagcggcacggcagccaggcggccatcaagcagcaccgttttcggttcgcgcccctgttcgagacacagcttgtggaagttggtattttgcgtcggatccagccatagacgctccggcgtcacaaaccagccgcggcggtcggcgcggtaaatcacgccgctggcctccagctgcgccaggctctcacgcaccgtaatccgcgtcgtgttgaacagcgcgcacagctcgcgctcggaaggcagcttgtcgccgcttttgagggcgccgttttgaatacgcgcctgcagctgcgccttaatcatcaggtattgcggcatctcgccagagggtgatttcatgtttactcactgccacttttcgtgcgctcattatacatagccagatgaattttttgttgcagcgccacatttcctttgaccctgtcccggctttgtctccatgataactataaatctggtatagaccaaatggtgagacaaatgacttcacgaaattacctgctgctgacccccggcccgttaaccacctcccgtacggtgaaagaggcgatgttgttcgatagctgcacctgggatgatgattacaatctcggcgtggtacagaccattcgccagcagctggtgcagttggctaccccggccgacggttataccgcagtgctgctgcagggtagcggcagctacgcggtcgaagcggtgctcggcagcgtcatcggcgaacaaggcaaagtgctaatcgtcagcaatggcgcctatggcgcgcgtatgattgagatggcgcaactgatgggcatcgcctgccacccttacgactgtggcgaagtctcccgtccggacgcggccgcgatcgaacagatcctgcagaacgacccggcgatcacccatatcgcgatggtacacagcgaaaccaccaccggcatgctgaatccgatcgaagaggtggccgaactggcgaaacggtacgataaacgctatatcgtcgatgcgatgagcagctttggcggcattccgttggatatcgccgcgctgaatattgattacctgataagctccgccaacaaatgcattcagggcgtgccgggctttgccttcgtgattgcccgtgaagcggagctggccgcctgcaaaggccgttcgcgctcgctgtcgctggatctgtacgcccagtggcgctgcatggaggacaaccacggcaagtggcgcttcacctcgccgacgcataccgtgctggccttcgcccaggcgctgaaagagctggcgcaggagggcggcgtcagcgctcgccatcagcgctaccgcaacaatcagcgccggctggtcgccgggatgcgcgcgctcggcttccggccgctgctcgacgatagcctgcactcgccgatcattaccgccttttattcaccggatgcgccgcagtatcgctttcacaccttctaccagaagctgaaagatcagggcttcgttatctatccgggcaaagtatcgcaaagcgactgcttccgtatcggcaacattggcgaagtctacgacgccgatatcaccgccctgctggcggctatcgacaacgccatgtactggaaacaataaggaaccgccatgaaccgtattagcgcactgatccttgactgggcaggcaccaccgtagacttcggctctttcgccccgacgcaaatcttcgtcgaggccttccgccaggccttcgatattgagataacccttgaagaggcccgcgtgccgatggggcttggcaagtggcagcacattgaggcgctgggcaaactccctgctgtcgatagccgctggcaggccaaattcggccgcgcgatgacggccgcggatatcgatgcgatctacgccgcgtttatgccgctgcaaatcgctaaggttgtcgatttttccgcaccgattgccggcgttgtcgacactatcgccgcgctgcgcgccaagggcctgaagatcggctcctgctcgggctatccgcgtccggtgatggaaaagctggtaccggccgctgccgcccagggctacgccccggaccactgggtcgccaccgatgaccttgccgccggcggtcgtccgggcccgtggatggcgctgcagaacgtgattaccctgggcatagacgatgtggcccactgcgtgaaggtcgatgatgccgcgccgggcatcagcgaagggttacatgccgggatgtggagcgtcgggctggcggtgtccggtaacgaattcggcgcaacctgggaggagtaccaggcgatgtcgaaagcggaaatcgccacccgccgcgagcgggcggcaggcaaactgtatgccgccggggcgcattatgtggttgataccctggcggacctgccggaagtgattgccgacatcaatgcccggttggcaaaaggcgagcggccttaagcgggtgaattcaccttcactttggccgccaccagcaggccggtaaacagcatcaatatccctgacaacaccagcggcgacagcagccctaagtggtcaagcgcaatgccgccgaccgcggcgccgcaggtgttggccagctggatcaccgccacctgaatcgacccggctttttccgcctgatcggagagggaacgggtgatccacgttgaccaccccaccgggatcagcgcaaacgcgaagccccagataatcgccaccgtcgaggcgatgattttgctctctccccacagcaccagcgccaccgcgcaggcggtcagcaccagcggcgcgatcgccagcgccgcttttaccgaacgcttgagcagcaccgaggagagcgaggtgccgataaagctggcgataccaaagctcagcagcaccagcgtcaggccgtcgacatcaaacccggcgagggtcatgtaaaccgggcgaatataggtaaagaaggcgaactgtccggcaaaggccatgaaaatggcgcacattccggccatcacccccggacgcttcagcagaccaaacatattttgctgctgagaagccgattcaccgggcagcgacggcagcgctttcagcacccagagcgtacacagcacgcccatcaccgccgcgccgttaaagacgttgcgccagccgataagcccgccaaggaaactgcccaacggggcggcgatcaccagcgcgattgataccgcgccgaagataatcgatagcgctttcggcaccacgcgcatcggcaccagacgcatggtcagcgatgcggacatcgcccagaaaccgccgagcgccaggcccagacaggcgcgccccagcagtagcagggtgaagctatcagcgaaagataccagcaggcaagaaagggtcagcagcagtgaaaacaggataaccacgtagcggcgatcggttttacctatcaccgtggtgataaacaggctggaaaacatcgcgacgaatgccgtcgtcgtcaccgactgcccggccatcccttcggagatgcctaaatccagcgccatcggcgtcagcaggctgaccggcaaaaactcaacggtaatcaggcaggcgacgcagaaagcaaccgcgaaaaccgccgaccagtttggccgcgcgagatcgcgtgcatggggtttggtttcatttgaatgactcatgagtgacctgcgaagaaagtggcggaaagctgcgcagtgtaacattttgtatgtgacgtacttaacgttttcgcaactcttctcgcttttcataagagggtgcgtagctgctcgcatgtttaaaaaaacgatgcttgctatcgctttaacaaatctcaggagaatttaatatagcactatgtgctatacttttaacgacaggatgtcagcaatgcgtatctttaaaaccaaatggttcgccagagaggctagctctcatggcatttccgacgacgagctctatcaggcaattcaatctgcgcttcagggcaaagtggttgatttaggaggaggggtttataaaaagcgactcaacaagaatcgcgatcgcgcaatcatccttaccaaaagcgcagggtattggttttatacctttctatatgccaaacaggatatggccaatatcaaccatcgcgagttaatgggttttcgtgagttagcaaaacactatgccaatctctctgaagagaaaacgacggtcttagttaaaagtaaagaactggtggagatttgcgatgacagcaaaaaataaatacaaaagcccggctttcgaagcgatccatagcgctgcgtcggggctattcagcgttggcgcaatcccacaggaaacaatgcgccattttgatgaatcatgtctcggtagcgtagccgcacttcaacccattgaaattaaagcgctacgtgaacaactcaatgttagccaacccgtgttcgctcgttatctgaataccagcgtgtctaccgtgcaaaaatgggagactggcgctaagcgaccgagcggaatgtcattaaaattgcttagcgtcgtacaaaaacacggcctgaaaatcctactgtagttatcctgccggatggcgcttacgcttatccggcctacaagtgacgagtgcggaaaccttaggccggataaggcgcagccgccatccggcacacaaaagcgatgaaccacaggccggataacaatgagatcagtgcagccagtgcacgccgtcttccgggagaaacaggtcgttatagcgctgctgaaggttatgcaaatcgctcatatccggatccagctcgcgcagaaacccttgcgccaggcggatctgcgcctcggtgatcggcgccgctaaacgcgctttttgcatcaggcgataccagtaatgcaggtttttttcgctggcgtcgacaatcgcgacctgccagatgagcagcacctgggcggcgttctgcagatgtgcttcattcggccgctccaggtaacgcaaatactcattaccggcggtttttcccagctgatcgatcatcgattccagcgggacaggcgtgatgccgaggcgttcgctcaggcggcggatcgcgcggcgtgaatcagaggtaagcacccgaaatcccacaacaaacaccactaccagggtggccagtcctatccagatcatgcatcctctcatccaatcgcagcctgactatcataatgggaatttgcctgctgtcgactgtcgggcctggcataatgcgcaagaaataaaaaagcccggcgcgaaggccgggcaaggttaccaaatacctggtgaatcaggcggcctgcaaaatacggttctttttctcgcggcgaattttacgctcttcaaagatagccacgatggccatcaggcagatacagccgacggcggcggcgtccagcgccgcaaaggtgccggcccagccggtcaggccgaagaccggggtgccgtcggcgatcatcccgagacccagtttggcgaagctatcgccgatcagataggcgaaggtgcccttgatcccatcggcggcgccgatcgcttttttcggtacgaaaccgacggcggcgacgccgatcaacagctgcggaccaaacaccaggaagcccagcgcaaataacgaggccagatagacgtactggttgctggcgtgttggtaaaccccgagggtggcgataatcagcgccagcgcgatgcaggccaccagcgcgcggcggccgttggccagatccgacagccagccccacagcagcgtgccgaccagcgcgccgacctcaaacagggtaaagccctgaatcgccacctctttcgacagcttcagctcctggaaggcgtacacggtggaccactgatcgataccgatacgcaccacgtagaggaagatgttggagaagcacagcagccagatcactttgtttttcagcacgtactcaacaaagatctgccacttggtcatcgcattttcttcggtctctttgtcctcttcgctgatcgcttcgccaaacagctcttccgccgtgccgaggccgtaggattccggagagtcgctaccgtagcgcaggccgataaagccaacgatcagcgcaataatcgacgggaagataaacatgccgatcacatggccgtcgaacagatagttggcgccaaacagcgccacgcccgccgcgcccgcgccgccgaggttgtgggagatattccagaagccgaggaaagtgccgcgtttgcgtctgggcgtccacttggtgatggtggaatagctgcacgagccgccggtgctctggaagaaaccgctcagcgcatagaaggcgatcatcaggaacaggctggtagaacccgcccccatgctggcgctaaagcccagcatacagatggcggagaggatcagcataaacggcaggaactgcttggtgtttttgccgtcggcataataagagaccagcgtcttgcccacgccgtaggtgatggagaagcccaggccaatcatccccagctgggtcatgctcagcccgtaggtggagatcatgtcgttctgcgcgatgttaaagttcttgcggatcaggtacatggtcaggtagccgatgaagaccaccagataggactgcatgaaaggtttgaaccacattttgcgccgcacatcgagcggcagatccagggtcggcttgcgcacctgattcagaaaggccagcatgggtatctcctgagctgattttttatgcctgcgtaataaccaggcattgtaaaaaccagcgcgccgtctggcctgagacggcgtccaggtaaaaccgggaaaatttcttagttttgtcccgttcgcggcgaaagggtgagctacatcacgcttcgctggcggtacgcggcgcctgcgcgtttaaaaacggcagcagcagcagcgcggaaatgccggcggcaatcgcaatcaccacgaagaatccggtccagtgccagatatccatcacctgcgccagcggccagccggaaagcgaggcgccaagataagcgaacaggccgacaaacccggttgccgccccggcggcttctttatgcgaacattccgccgccgccatgccgatcagcatctgcgggccgaaaacgaagaaaccggtagtgaagaagcaggccgcctgcatgacatagctggcgaacggcatcagccacaggccgccaaccgacagcaaaattccggcggcgaaaatcaggttcatcggcccacggttgccgttaaacagcttatccgagccccaccccgccaccagcgcgccgataaaaccgcccagctcaaacatggtcaccgccgagttagcggtcaccagatcgacgccgagcgtctccgacatatacagattgccccagtcgttaatcgccgcccgcaccacgtacaccagcacatagcacaacgacagcagccagatgtagggattggccagcacgtagcgggtcaggatcgctttacgagacatcccagcgccttcctgctgctgggcgatttccagcgcatcgtgacgccagtcgcccacggcgggtaaccccaccgcctgcgggcgatcgcgcagccgccagcacagatacagtccggcgaggatcgccagacagccggcaatggtcatcccggcacgccagccgtagtgcaacgccgccgctcccaccaccatcgggatcagcgcgccgccgacgttatgcgccgtattccatagcgcccaccagccgccgcgctcggtccgcgaataccaggccgtcagcagtcgggcgcagaccggcgagccccagccctggaagaaggcattcagtgcccacagcagcgcgaaagcccatagtgaggaagaaaaaccgaacagaatattcaccaccccggtggcgataagccccagccccataaaatagcgggcgtcggagcggtcgctgacgataccggagaaaaatttcgacagcccgtaggtgatatagaacagcgtggccagcaggccaatatcgctgcgggtcaggacgttgctggcgagaatttccgggaccgcggcgttaaagcttttgcgggtgaaatagaacagcgcgtagcccagccagatggtcaacaggatatggcgacgccagtagcgataacgcgcatcaagctcgcgtttatcgctaatcggcgcagcgtccggcggggcttttaaaaaggcgaacatcggcgatcctctcaggcgtaacgcagcggtagattgacgcacacccgggtaccatgggtgcaggagatcgtcagtgtgccgcccagggcggtcacgcgctcgcgcatgccggtcaggccgaacccctgcagattcgaccccggcggcaggccgcaaccgtcatcttccagcaccagcattagtcgctcatcctgctgccagccctgcagagtgacagcgctggcgctggcgtgcttgacgatattattcagcccctcctggcaaacgcgaaacagcgtcacgcgctggttctcgctcagtcccgcctcgttaatccgccagtcgagatggctgacaatgccgcggtcctccagctccatctcgcgcatcaacgaacgtaccgcctgctccagcggcaggtcgtcgagctgacgcggacgcagacggcctagcagtctacgcaccgagtcgtaaactcccagcgacagctgttctatcagctgaccgctctggcgcacgctggcattgtccggcgccagccgctgtacgatcccggcctgggtgcggatcgcggtgatggtctggccgatatcatcatggagctcgcgggcgacgtctcgccgcacgctctcttcggtctccagcaggcgttccgccagccgacgattacgcgccagctcgctttgtaatgactggttcagctcgcgtaaccgctggatccccgcccccaacagcagcccggtgaggctctgtgccagcagggaaagcaataaatcgaccgggtgatcgtgccaggtctggctggcaatcaaggcgatagcgttcatcagggtggcgatcagcgctccctgccagccgtagtgccaggcgagggcgataatcggcagcgccagacaaaacggggtaaagcgggagagctcggcgggcaggccaagctgcagccacaggctaatggtgaataacagcagataccagatcagatgccgcccgcgccagttaaccggctgcgccaccagcgccggccccagcggccgccagacggtgctggtaagatagtgccagaaaaccaggcaggtcggcgccagcgtcaggccgccggtcagcgtcaacagcagggtgttaagcccctcgtccccctccgccagccacggcagcgattgcagcagcgcggcggccattaacgccccgccctgacgcagcagcgtcagccagtcgcgctgctgccggtagcgcgagatcaacgccaccggcagcagagtcagcaggcttccggtcatcaaaattatcgggtgcgccagcgccacctcctgcgccagccataagataagcagccactcggttcccagcagcactggccagtagccgcgggggcattgcagcattaaccccagccgcaggccaaagggaaacagcagcaccgctaaatccgcgcgttccaccaaatgcagactgatgctccacaggcagaaccaggcggccgcgaagataaaggcgcagccgatgaccgacagcaatcgtgagacgacggccttcattgccagctatcgaacatgcggcgcgccagctcaacgtcgttgctgacgcccagcttttccagcaggttggcgcggtgtacgtggacggttttcggcgacagaccgagctcggcggcaatctctttcaccgccatgccctgcgccagcttttccgccacctgacgctcgcgtttggtgagcggatcctggcgcccggcggccaacttcatggcgatatccggcgtgagatagcaaccgcccgccgccaccgtgcgtaccgcggcgataagttcatcggggctgcagcgtttcgacaggaagccgcgcgcgccggcattcaacgcttgctcgatcagcgccgggctatcgtgtaccgacagcatgatggtcgccatccccttcggcagctggctgagcagctccagcccggaaatatccggcattgagatatcgcagatacagacctgcacgccgcgccccggtagccccgtcagcgcctcgcggccgctaccaaattcggcgacaacctgaaaatcagcttccagccccagcagctgagcaaagccggagcggacaatcaaatgatcgtcaataagggcgatggtggtcatggtgtttcctggtgcctgaaaacgccggatggcggcgtaaacgccttatccggcctacggattcactgcttgtaggccggataagcgcagcgtcatccggtaaaggcgcttaccttagcgataagcgcgtggctgttcaagccttgagcgctattcgaagaacaccgcaattttgttaaacatggtgggatcggactggttacgcgccactttggtgacatcttccagcttttcaatctggctaatcatctgccccagtcgctggtcatcatttaccagcagccagatgcggctgtgttcgctgccctgaattggcagacagagaatgccttcgacgttaaacgcgcgacgggcaaaaagcccgcacacgtgggtcatgacgccgggatggttgcggacggtgagttccagaatgacgttatcacattgtttttgcatggcttattcccccaccatttcagtattggccgcacccggcggtaccatcggatacactttctgctgtgcgtcgatgcgcacgtggatcagcgccggccccggacggtcgatgatcgcctgcagcgccgcctgcggatcgacttcattatttaaatcacaggtttgcaggccaaaaccggcggcaatctgcataaagttaatcatccccggataggtggcggcaaaaacgccctgctgatagaacaggctctgctgctgatgcaccagccccagcgcttcgttgttcagcaggataatttttacatccagctgattttcggcggcggtggccatctcctgaatattcatcatcaggctgccgtcgccggagaagcagataaccttgcgctgcggattcgccagcgccgcgccgatggctgccggcaggccgaagcccatggtgccgaggccgccggaggtcagccactggcgcggacgattgagcgggtaggcctgcgccgtccacatctggtgctggccaacgtcggtagtgatgatcgcttcatcatccacgcaggcggccacggcgttaatcaggccgtaatgggagagcgggtcgctttcctgcgggatggcgcaggggaattcgcgctgcaagtcggccaccagctggcgccattcctcgcgcggctgcgcctcaatctgcgggttcagctgggctaagacttccgccacatcgccctgaatcgccacgtgcggttgcttaattttgcccagttcggcgcggtcgatatcgacgtggataatcttcgcgttcgggcagaactgctcggtcttgccaatcgcccggtcatcaaaacgggcgcctaaaacaataagtaaatccgcctcctgcagaatgaagttggtgctgcgcgcgccgtgcatccccagcatccccagcgacagcgggtgcgccttcggcagcatgcccagcgccattaaggtcatggtggtcggcaggttggctttttccgccagctcacggatcgcctgcggcgcgttaatcaccccgccgcccagatacagtaccgggcgtttcgccgcgttgatcattgccgccgcttcacgcacgctttcaggcgcgaatgccggtgccggggcgcgctcgccaggctcaggcagcgcttccagctcaatggtcgccgactgcacgtccttaggaatgtctatccacaccggcccgggacgtccggactgggcaatacggaaggcgtcgctgatcacctgcggcagctcggcaatgtcgcgcaccagatagttatgtttggtgatggggatagagatgccgtaggtgtccacttcctggaaggcgtcggtaccgatcatcgaggccggtacctggccggtgatgcagaccagcggaatcgaatccaggcgggcatcggcgatcgccgtcaccaggttcgtcgcccccgggccgctgcaggccatacagaccgccggcttgccttcggtacgcgccatcccctgggcgataaagcccgcgccctgctcatggcgcgccaggatgtggcggatctgcgtgctctggcttaaggcatcgtagataggcaggatggagccgcccggaatgccgctgaccatagtgataccctggcgctccagtaaatgaacaaccagctgcgcgccggtaaagcgcattgtgtttgatgtggtgcccgaacttgccatgctccagtccttttcttctgggccgactttaccggggggctcgccaacaaaaaaccccgctcggtttgcgccggcggggtttggaattcgtgttgttccggaccctacggcgcattgccgacgacgaccaccacagacacgacgaccaccgcggctggcgcggtttttagtagggtcgaagcgatcagggttgcgttcattagggacctgttgtgtctaaaaataagctgaatttatacaaacacaggttttacgttttcacaatggatttattttcatccacgaaaatttgcgcgaaagatcacagttcggcgcaaaaggacagaaaacaaaaaaccccgccggagcgaggtttttatcagcatggttacaggtggtagccgcaagcacactgtattacgtcaacgccaaaagtatacgcgatcgctgcagttcgcgcaatttaaggtcggtttttctctgtcatagagtatggatgagaggggcggatttgtccaaaaaatactgttcatccatacagtgtttatctatactgggtgtgttcactttgtgccattcgggggccgcaagtttgaccggcgcaacgaagtcctggctgaaacgggtggtgccgtcagtgccttaaccccgagagagcacactgtgttacgtcaacaacgtgcagtcactggcccgcgcggcaacgcgtggctcagcgctgcgcacccctgtcgttgcaggcggcgggccgggaagccgttcatggaaaggacgaactatcggccagggcagacgccgccggcgacaggcagggataagctggcaacgggcagcggaaaggtacgtcagcttattgtgctccttaaccacaggagacgcgcgtatgggcggaatggatattattattttgatcctgaaactcatggttgctgtgttgcaactacttgatgcagtcctgaaacagttccgctgattcaggttcaagtcgcacctgaggggggcgggaaaccgcccccctgcaggcgcccgccgggcgtcccgggatgacttgatggaggaagctatgccacccctgttaattgccgccacgacgccggatgccccggggttcgcggcgctacgaattgaaagccttgaacagcatttcaatatgctgcgccgcctggcggaaaactggcagagcggcaaaaaccgctttaacgcgccgggcgaaacgctgctgggcgccttcgtcaaccaccagctggtaggggtatgcggcatcaatagcgatcccttcagtccgcagccgcgggccgggcgcattcgccacctctacatcagcgaacgctaccgtcgccggggcatcggccagcagctgctggtctcggttatcacccactccagcgcctggttcgactttctcaacacccatgccccggcgcaggcctggcccttttatgaaaggcttggttttcgcccggtgtacgatgaaccgcgggtgacgcatcgcctgttttgttcgctttaacccccgctggcaggcagcgcgggcgcgtgttacattccggtgaccttcactgttgaacctgtctgcgatgaccctcaccgtattctgcattttgctgttcgccgccctgctgcacgccagctggaacgctatcgtcaaagccagcggcgataaaatgtacgcggcgatcggcgtcagcggctcggccgcgctgatcgccctggtgatgctcccctttgccccgcagcccgcgctggtcagcgccccctatctgctggcgtcgtgcgcgttacaggtggtgtatacggtgctggtggcgaagacctaccaggtatcggatatgagccagacctatccgctgatgcgcggcactgcgccgctgctggtggcggcgataagcgtgctgttcctcggcgatcgtctgtcgccgctggcctggctgggtatcggcgtcatctgcctggcgattctggcgatggcctttaacggccgcgccagctcgcgcaaaggcatcgtgctggcgctgatcaacgcctgctttatcgccggttatacgctggtggacggcaccggcgtccggctggcgggctcggcgctgggctacaccctgtggaccttttttatgaacggcttctgcctgctgtgctgggcgatggtggcgcgacggcgtgaggccagtcgttatttacgtcagcactggaaaaaaggcatcctcggcgggatcggcaccatgggctcctacggcctggcgctatgggcgatgacccaggccccgctggcggtggtcgccgcgctgcgtgaaacctccattctcttcggcgcgctgatcgcctttatcgtcctgaaagagcaactgatgccgctgcgcatcgtggccgcctgcgggattgccgccggggcgatcctcctgcgcctggcgtagcctgagatggcaacattagttgccgttcctgtttacataatctgcctggaattccctcaacaatcggcactttgcagttgttctgtcattttaatatggtagattcctccatcgtttacgggatgtggtagtcacatattcttcatttatctttactcacaaagtattcatcgacatgaaacggcataagaacttcaatttgttgttgatgctggtactgctggtggccgtcggccagatggcgcagaccatttatattccggccatcgccgacatggcggtcgcgctgaacgtccgcgaaggggcggtacaaagcgtgatggcggcctatctgctgacctacggtatttcacagctgttctacggcccgctctctgaccgcgtcggtcgccgcccggtgatcctcgtcgggatgtcgatttttatgctggcgacgctggtagctattaccacccatagcctgccggtgctgatcgccgccagcgccatgcaggggatgggcaccggggtcggcggcgtgatggcgcgcaccctgccccgcgacctgtacgaaggcgctcagctgcgtcatgccaatagcctgttaaatatgggtattctggtcagcccgctgattgcgccgctgctcggcggcatcctcgacaccctgtggagctggcgcgcctgctacgctttcctgctggtcctgtgcgccggggtgaccttcagcatggcgaagtggatgccggaaacgcgcccggaaggggcgccgcgcaccaaacttctggccagctacaaaacgctgttcggcaccggcgcctttaactgctatctgctgatgctgatcggcggcctggcggggattgcggtattcgaagcctgctccggggtgctgatgggcgcggtgctcggcctgagcagcatggcggtgagtattctgtttattctgccgatcccggcggcgttcttcggggcgtggtttgccggccgccccaacaagcgtttcccgaccctgatgtggcagtcggtgatctgctgcctgctggcaggtctgatgatgtggatcccagggctgctgggcaacatgaccgtctggaccctgctggtgcctgcggcgctgttcttcttcggcgccgggatgttgttcccgctggccaccagcggcgcgatggagccgttcccgttcctcgccggaaccgccggggcgctggtgggcggcttgcagaatatcggctccggcgtgctggcctggctgtcggcgatgatgccgcaaaccggtcagggcagcctcggcctgctgatgatgctgatgggcctgttgattctgctgtgctggctgccgctggcctcgcgcttcacccaccatcagcagccggtataagcgcggcggtggttccccggatggcggctgacgccttatccgggctaccggactggtcgtctgccggcccgcgcaagcgcagtgccgtcattttgccgggtggcggcgcacgccttacccggcctccctaacaactccgagggatagcccggctctttttcaggtcaggctatgcagccactcgataaaggcgtcgattttcggccactggcggcccggcagggtggtcacgtaataatgctgatggcatttcagcgtcatatcgccgaacggcgcgataagctcgccgctctctaaccgcttctgcaccagccgtttacgccccatcgctaccccgacatgattcatcgccgcaatcaccgctaaatcagaacgatcgaagccaatgcccgacgattgcggcagttcaatcccaaattgttgtgcccaactgaaccattcatcggtgccggaatcattgctccatgcctggcgatcgtgaagcagcgtacagtggcgcagactggcaggatttgacgttaactgcagctggcgggcgtaatacggcgtacataccggcacgatcgcctcatccatcagaaaatggtggcttagctgcgacgacggcgcgtcatcaaaatagattgccagatcgatacccgcccgctgcaggttgacgttatcgttgccggtcagcacggtcagcgagatggccgggtagcggcgactgaaatcccccagcgccggcaccagccagcactgggcgatagagggccgcgagtagaccgtcagactgccggagagctcctggtttttgatgtccagaatctcctgattgagaccatccagcgacgccttcagcgcccagtaaacgcgcttcccttcacgcgtcagctccactttgcggtgcgagcggacaaagagctggatccccagctcctcttccagctgattaatccggtgactgacggcgcttggggtgagcgccagctcgtcggcggcaagggcgaacgactcgtgccgcgccgccacctcaaacgtcgacagcctggagagttgccagccgttcagcaaccgggtacctaaggtttttagcacatccattatgcgctcctggcgataatagggagtctggatgataaaaaaataatgccggaacttccgctaaaggatgagttaatttgacccatagcatatttagaggtcacttttagagctaaatcacctttttgattcaatttggctcatctgaaaggtcatttatatcgtttgtcagcccatgccgagtttctgttcaataaccacacgttacttacggcgaggtggggtatggaatcgcaaatttgggttgtgagcacattgctgattagcatcgtgttaattgtattaaccatcgtcaaactgaagtttcatccgtttctggcgctgctgctggcgagctttttcgtcggggcgatgatgggaatgggcccgctggagatggtcaacgccattgagagcgggatcggcggtacgctgggcttcctggcggcggtgatcggtctcggcaccattctcggcaagatgatggaggtctccggcgcggcggagcgcatcggcctgacgctccagcgctgccgctggctgtcggcggacgtgattatggtgctggtcggcctgatctgcggcattaccctgtttgtcgaagtcggggtggtgctgctgatcccgctggcattctccatcgccaaaaaaaccaatacttcgctgctgaagctggctattccgctgtgtaccgcgctgatggcggtgcactgcgtggtaccgccgcatccggccgcgctgttcgtggcgaataaactgggggctgatatcgggacggttatcgtctatggcctgctggtcggtctgatcgcctcgctggtcggcggcccgctgttcctcaggctgctcggcaaccgcctgccgtttaaaccagtgccagccgagttttccaacctcgacgttcgcgaagaatcgacgctgccgtcgctcggcgccacgctgtttaccgtgctgttaccgattggcctgatgctggtgaaaaccgtcgctgaactgaatatggcgaaaggcggcacgctgtatacagtgctggaatttatcggcaaccccatcaccgcgatgtttatcgccgtctttgtcgcctattacatgctcggcatccgtcggcaaatggggatgggcgttctgctgattcataccgaaaacggctttgggtccatcgccaacatcctgctgattatcggcgccggcggcgcattcaacgcgattttgaaatccagcggcctggccgatagcctcgcggtgatcctgtcgaaccttgatatgcacccgattttgctggcctggctggtggcgcttatcctgcacgccgccgttggctccgccaccgtggcgatgatgggcgctaccgccatcgttgccccgatgctgccgctttatcccggcgtaagcccggagatcatcgccattgccatcggttccggcgccattggctgcacgatcgtcaccgattccctgttctggctggtaaaacagtactgcggcgccagcctcagtgaaacgttcaagtactacacgacagcgacatttatcgcgtcgctacttgcactggccgccaccttcctgctttctttcattatctgagcgcaaagagacgtatgatgaaacacgctaacctgaccaccttaaccgcgaccttcccgcttgtgcaggatctgatcgccctgaaagaaaccacctggtttaacccggcaaccaccaccctggcggaggggttgccttacgtcggtctgaccgccgacgatgtgcaagacgcccatgcccgccttcagcgcttcgcgccctatctggcggcagccttcccggaaaccgccgcgagcggcgggattatcgaatcagaagtggttgccattccggcaatgaaacgcagccttgagcaaaaattcggccagccaattagcggcgaactgctgctgaaaaaagacagccatctgccgatctccggctcaatcaaagcgcgcggtgggatttatgaagtgctgacccatgcggaaaagctggcgctggaagccgggctgctgacgaccgcagacgattatcgcaaattgctgacgccggagtttaaacagttctttagccagttcagcatcgccgtcggctccaccggcaaccttgggatgtcgatcggcatcatgagcgcgcgcattggttttaaagtcacggtgcatatgtccgccgatgccagggcgtggaaaaaagccaaactgcgcagccacggcgtaacggtggttgagtatgaagaggactatggcgtggcggtcgaacaggggcgcaaggcagcggaatccgacccgaactgcttttttatcgatgatgaaaactcgcgcacgctgttcctcggctatgccgtagccggcgagcgcctgaaagcgcagttcgcgcaagcaggacgcgtggtcgatgccgatcatccgctgttcgtctacctgccgtgcggcgtcggcggcggccccggcggcgtggcattcggcctgaagctggccttcggcgaccacgttcactgcctgttcgccgaaccgacccattcgccatgcatgctgctcggcgtctataccgggctccacgaccagatagcggtgcaggatttaggcattgataacctgaccgcggccgacggtctggcggtcggcagggcgtccgggttcgttggccgggcaatggagcgcctgctcgacgggttctatacccttgacgaccagacgatgtatgacatgctgggctggctggcggcagcggaaaatatccgccttgaaccctccgcgctggccgggatggccggagcgcagcgggtctgcgccagcaaagcgtaccatcagctgcaggggctgagtgagcaacagctgcagcaggccacccacctggtgtgggccaccggcggcggcatggtgccggaagaggagatggcgcagtacctggcgaaggggtgctaatctttagcgcagcagcggcatcagcgcctctggtggccgctgctgtcgtcgcaggtcccgcatcactcgcatatagggcccgctaaaatcgtagaactgccggtaacccgcgcacagcgggtcttcctgttcgccacagcggcacaggcgcagccacgggcagccgtagcaggtgctgttggccgccggcgcgcctggctgggtcagcgtctcgccgcaccaggcgctcagcgtctcgctaaacagtaaaatattgatgcgcccaatatcttcccgcacccagcggtgaaagactgcgcagagaaactctccccaaagcgcggcgtcgccggccgccagctgcggaataaaatggatagcggtgagcccctgttgacgaagctgtgcatagaacgcctgcggttgatggcaatgatgcgcctccaccacgacagcctgaaagggagtgtcatgttgctggccgggggcatgagtgagaggcaaattcgccggacatcctgtcatgacatatccctaatgaataaaacgatcggttgaaggtgagtaacagcaaacaggaatgccagagaaagtactgcgagtgcgatcaaaaatttgtcacgaaccgcccgcggctgtaaaaaatcgctatcgtcgacatccatcagatgacgacggcgggtatagccccagaggatcaccgccacaatcgccagcacgccgatcgacagccagaacggcaggccggcgcggtgccagctgtgcttaatcgccagcgccatcagcgcgccgtagcccaacagggtgcgaaaccaggccagcgaggtgcgctctggctgaagaccgggatcgctttcccgccgcgcccggcgtttatccgccatacaccaccagcagcatcaccgcggccaccaccgccagcagcagaatgctaatcaccagcagcgtgcgggtatagggaagatcctgcttgaggcgcatcgccttctcgttattcagccagcgcagatagccatagatggccatgccgccggcaaagagacacagcagcagggcgagaatttcacggatcagcggcgtggcaaagtccggcgctaactggtcaaggccgacgccggcggcgagaaaaccgagcgccgtgcggatccatgccagaaaggtgcgttcgttagccagcgaaaagcggtaatccggcgcttcgccgaggcgggagattttcattacagttccttgttcatcgcgctgcaggcttcagcatagcgtaaatcaggaaccggggagaagaaccggcgccccgcagggcgccggtattacaacggggattaatgcagctcaggccagtaatctttgttggcggcaatgaggtcgtcgaggatcgctttcgccaccgaggcgctcggcacggttttcgacagggtaatcgcctgccacagcttgtggtacgagcgctgttcccaggcatcgaccaccagtttttccactgccacctgctggctcatcagccctttctggaaatgcgggatgtcgccgaccgtcagcggctccggtccgttgtggcctaccagacaagggatctccaccatcgcgtcggcgtcaaagttatggatcgcgccattgttcggcacaatcagcagcatcctttcctgcgtgttaaaggcgatagccgtcgccagatcgacgatataggaggcatgctcgtcaatctccagatcgccggcggtggatttcccggcggcgatgatcgcccggcaggcgctgaagacgtttttctcccgatgatccatcacctcattggcgcgggtgcgttccgggttggagtgggctaccacatagtccgggaacagataatatttcaggtaggtattcggcatggtctgcggatccagcgcctgcacatctttcgctttggcaaaggtgtcgttccagctggcctcggtgtgcggatcgttcgagggcggcacatagccgtatttcgccacatattcgcgcagtttcggcatcaaatcattgccgtcgaggtcctcaatcgacgtccaccagccgaagtggttgaggccgtagtagcgcacgcgcatctgtttacggtctttgaggccgacaatctgcgccatccgcccttcaatgccgatcggcatatcgcagatgttgaggattttggcgttcggccgcagacgacgtgtggcttccgccacaatcgccgccgggttggagtagttaagcatccaggcgttcggcgaatatttttccatataatccaccagctccagcacgccgccgatagagcgcataccgtaggcgatcccgcccggtccgcaggtctcctggcccagcacgccgtggcgtagcgggattttctcatcttgttcacgcatcggatatttcccgacgcggatatgcgccatgacaaaatcaacatcggtaaacgccgcctgcggatcggtggtatagctgaactcaatctccggcgcctgctctttgaggatcactttgcacgccttggcgatggtctcctggcgcgcgccgtcgttgtcataaaatttcagcgaccgcagcggaaaacgatcctggtttgccagcagcatcaggacaatgcccggggtgaaggtgctgccgccgcctgcgataacaactgagaattttttcatgatactgcctccgtcatggtggtatgttcggtcgaaagagaatctttcatcaggttttccagctggtcgcgcacctggggaacgtgcaggccgacgatgacctgaatcccgttgccgcggcgtactaccccgtgggcgcccagcgctttaaagacgtcgtcactttgcgttttcgccatatcgaccagcgcgatgcgcagtcgggtggcgcagttgttgatgctttcaatgttgtcggcgccgccgagggcctgcaggaagccagcggcctgacccagccgggtctctggcgcggcggcggccgtggttttacctcgtgccgcctggtaatcggccttgctgtagagcttgatttcgctctcttcccggccaggcgtcttcaggttcagacgcaggatcagggtacggaagactacgaagtagagggcggtgaaacagaggccgatgcctatctgaatgaacatcatcgaagcgtggtgatggaacattgggatccagttttgcggcaagaattgatcgagcaggccgccgccgaagttgcccaccacgccgcagatgtacatcaccgtcgccatggtcgccgccagcaccgcgtgaacggcgaacagcagcggcgagatgaagaggaaggtgaactccagcggctcagtgatcccgaccagcatcgcggtcagggtggcggggatcagcaggccggcgaccttgacgcggttttccggcgcggcagtgaagtagagcgccagcgcaatccccaccgaaccaaacactttcgagttaccgtgcagggcaaagccgccctccgggaacagcgtcttcagcggttccgtactctgactgaacgcctgcagatgctctgcccagtagacctgcagtccgccctccaccaccgccgggccaaagatgaacgggccatagacgaagtggtgcaggccggtggggatcaggatgcgctcaaggaagatgtaaacccacaccccaagcgccccggctgagcgcagaaaggcctgcagcgattcaatacccagctggacctttggccagccgagcagggtcagccaggcgcaagggatcatcgcgaggaaggcgacaatgaccacaaacgatgaaccctgaaagatgccgaggaataccggcaggggtttatcgaaatagcgattgtgcagggccgtcaccagaccggagatgacgatggcgccgataatgctggtgtcgagggttttaatcccggcaatcatcgtcaggccgctgccggccgtgggttcagcggaaaaatcgacgccgaagaagtggccccaggtcatccccatggcgttgataaagtagttccaggtgagaaagctcaccagcaccgccagacaggcccggccctgggcctgtttcgccaggccgatcggcagaccgacggcgaaaatcagcggcatattacgaaagacggtccagccgccctcctcaatgatgtgaacgatctgggcaaacaggctgtcgggtgcggtcagcgcttcgccgacgaacatcgggttgcgcagcatgatggcgataccgaccacaatcccggcaaaagggaacaataaaaccggggtaaacatggcgccgccaaagcgttgtatttgactgagcattgggaaatcctcatgtaacaactcgtagggtgagtggccttctttttcttgattaccggcctgactggagaataaaaatttgcccgtccgacaacatgccgcgccgttgcgattcgtgatcccattcatggttttaatttggccaaagttgtctacttcgataacgaaagttagacatcgataagtcaggcagcgaaattaactaaatgaatgtgtcttaattgattgtaattaacctacttttttagaaaaaagagcacaaagcgacatccccttttcctgcacaagaggactactggtgatctacaaatccattgctgaccgcctgcggctgcggctgaattccgccgacttcgccatcggcagcccgctaccaggagagaaaaaactggccgaggagttcggagtggcgcgcatgactattcgcaaagccatcgatctgctggtggactggggattggttgtgcgtcgccacggctcgggaacttacgtggcgcgtaaagacgtccatcatgaaaccagcaatctgaccggcctggcggaagtgctgcgcaagcagggtaaagaggtggtgagtcaggtgctggccttcgaggtgatgcccgccccgccggccatcgccagtctgctgcggattaaaattgatgaacggatctacttctcacggcgggtgcgctacgtcgacggcaagccgctgatgctggaggatagctatatgccggtgaagctgttccgcaacctgtcgctgagtcatctggaagggtcgaaatttgattatattgagaaggagtgcgggatcatcatcagcggaaactatgaaacgctgacgccggtgctggcggacaagcagctggcgcgctcaatgaacgtcccggagcagacgccgctgctgcgtattacctccctttcctacagcgacagcggcgagtttcttaactattcggtcatgttccgcaacgccagcgagtatcaggtggactatcacctgcgccgcgtccaggcgcaaagcccgctagcttagcccccagaacagcacggcgagtagctgcggggtgataatgcgcaggaacatcaccagcggatagacggtggcatacgagagcgccgctgcgccgctggtggcgtgcaggttgttggcgaaggccagcgccggcgggtcggtcatggagccggccagcatgccgcacagcgtcagatagttcattttcgccagcatgcgcgcgaggacgcccaccgtcagcagcgggatggcggtgatgaaaataccgtaagcgatccagctcagaccatcgccctgggtcagggtggcgacaaagtcaccccccgattttagcccgaccaccgccagaaacagcactatccccagctcgcgcagcgccaggttggcgctcggcggcataaaccagtacagcttgccgatactgccgatacgcccaaggatcagcgccataatcagcggcccaccggccagtcccagcttcagtgcggcagggaagccgggaataaacaacgggatagatcccagcagtaccccgagtccgatgccgataaacaccggcagcatctggacctgctgcagcttctgctgagcgttacccagttcggcggccacggcgtcaattgcctccggacggccgaccaggttgaggatgtcaccaaactgcaggctggcgctgctgctggctaccagctcgacgcctgcccggttaagccgggagatcactacgtcatagcgctgtttgacgtgcagatcgcgtattttcttccccagcactttttcgttagtgaccaccacccgctccactttcagatcggtgccgcgcgtcgacagcgaggtcgccacctcctggcctatcaccagctgcgcattgtgcagatcctcaggtcgccccaccaggtgcagcaggtcgccagcctggataagggtgcccggcgcaggcaccatcaacagctcgccacgcttcagccgcgaacagacgatgttgtcgttgttgagcatcggcacatcctgaatcgccatctggttgaggttggggttttccacccgcacgttgatggtgtgtaaatgggcgtggccgttaccgctgctctcctcaaaccgctgggcctctttctcgacattgatgcgaaagaacagacgcaccagccacatggtcagcagaatgccgcagatgccgaacggatacgccatcgcgtagctcatccccatttgatcgaccacctcgaacggtacgccgagatcgcgcagaatttgctgcccggcccccagcgccggcgtgttggtcaccgcaccggaaaagatgccgagcaccaccgggagaggaatattgaacagtttatgcagcaccgcggtcaccaggccgccgaggataacgataagaatagcgaacagattgagccgcaggccagagacccgcagcgaggcgaaaaagcccggccccacctggatgccgatggtgtagacaaacaggatcaagccgaattcctgaataaaatgcagcatcgggctgctgagggcgacgcccgcctgatcgacaaagtgaccgacgataatgccgccaaataacacgccgccaataccaaagccgacgccgcggattttgacattgccgatccacaacccaaccaccgccaccagcgccagcacgctgaccgtcaatgctatctcactcatggtaccgtccctgtgaataacattattattaacagggattatgaccgcggccaggcggattgtatgctgcctggcgcacaataatcatggagtaagatacgctactcaggcgcgttcttatttttcgctgcgatagtgagttgctgaatacttttctccggggaaggaagtgcttcaggcatagtgccacccaggtctttaatagtctggcgtactttttgccctacgtcataatgcgttttgttggcgagttgcttcgaatcaaccgcgtcccgacgtagtttttcttccgtttgggtagcacgaaacaggttggccgcgagctcagtcgatcccatatagtcgagtattttttggcttttctttaggcccttacgctcatggattgctttttggtcaagaccaccatagagacctttataaccatggttttgaaagacagcaaaatcaagagtcgtctcaacaccagcacgttgggccgtttcaaccagatgtttattatgctctttgagctcattgcgcaggaacagtcgcttttcatcctctcgtagagacttaaatatttgatcatcttgcaattcctggcgccgggtttgcaaggcaaagtacgtttgccccgcagcaatcaccggtttcgacggatcgccattttgcactaccagatagcaggcgtagcgtgagaggtggaaatcttcaagattcctgctggcgccagaacctaattcgaccattttgttggtttcaacaaaatggtctgccgagggatgaccactcgcctcacatgaaattatcgcttttgcaatgaccttataaaaattccgccactctttatagtcaagcaggggaccaaggttgcgggcagaccaatactcccgccccgcctcatcgctctttctaatcgcttcaaatggctgctgttcgttcataacgtatccttgtttgagtgagtcccaaagtatgattgttttttaaactgaaacacccgttgcagcaaggaagtttattgtgctctcgcacacaaaaaagccccgaaaatcggggccttataagttattcgcttaattaactatttaatgccggtcgttcgctgatggcgatacgctgcggggcgatctgctcaggctcattgcgggtcagatcgatatgcagcaggccattggtgaaggtcgcgccagagacctccatgttgtcggcgagggtgaagctcaggctgaaggcctggctcaccaacccctggtgcagccatgtggtctctttttccggctgctgcggcgtgcctttcaccaccagacggatgccttccagttgaatatccagatcttcctgacggaaaccggccagcgcaagggtaatgcggtagtggttatcgtcgcttttttcgatgttatagggcgggaagctttggctttcaccggcggtttgcagggcgctggccagtttgtcaaaaccgatccattgacgcagcaggggggataaatcgtagttacgcatactgttttctccttctaagaagcgagtgaatacctgcgaattctgtaaattcgcatctgctccctgacggcgagcaggttgttacatcaggccgccacgcggcctgaaacggacaattagttgatttcgatgcggcgcggcttgttcgcttccgggatcacccgttccagatcgatatacagcaggccgttcaccagattggcgccgcggacgtgaatgttttccgccagctggaatttgcgctcgaagttgcgctcggcgatcccctgatacaggtaggtccgctctttctgctcggcggcgtgggcgcctttgacgatcagcagattgtcctgggcagtgatctccagctcgctttcagcaaagccagccaccgcgatagcgatgcgatagtggttttcgtctaccagctcgacgttatacggagggtagccgccgttgctctggctttgattgttttccagcaggttgaacaggcggtcgaaaccaatggctgaacgatatagcggggaaagatcgaagttacgcatagtaaatagctcctgaaaatcagcgagaatcaaatgaccttccatcgtggacaggccgcggtaacccggaatacccctcaggcgtattctcagtgggttacacttataaaatgggtttctccccgtgtttttcaagggattgagggcaattttttttgcagtttatcgatgattgcttagactgggtggaggagcacaaaaagcaaagtgcgatgcccgccacagtgcggcgcaataacactatgcattcacgggatggcccgatataaccgctgaaaggttatctcaacgcccgaaacgacaatggaagaacaatgaaaagcagacgactgttaaagctggtcctgttcagcgggataataagcctgagcggttgctccagcgtaatgtcacataccggtggcaaagagggaacctatccgggcacgcgatccagtgcgcaaacgctgggggacagcgataccaactggggtgtgaaatcgctggtggcgctggacatgccgttcaccgccgtcatggataccctgctgctgccgtgggatatgttccgcaccgacagctcaatcaaatctcgggtcgaaaagagcgagaaggctacgctggcgaccaactcggtgatcccgccagcgccgatgcctgcccagtaagttatcgtccggtctgcgtaacccacagctgacgataaccgtccacctcctccatccaggcaatctgtttaccgtctggcgaaaagacgatcgcgtccgccgagggcgcatgcgcatgcgtatcggttaaaaaggtgatatctcccgtaccggcatggcagcaggcaatccgatcctccagcgcaaaacccagccactctcccgacggatgccagttaaacgccgactggatacccgacgcgtgatgcgtcaactgccgcggctcgcccccctgcggggaaataagccacagctgcactacgccggcgtcgtcgcgcatcagaaaggctatcgccgtcgcctggggattggcgcgcacccagtggcgcgggacgttcaccagtcccgggtagcggcgatggtgggtgaaggtcaaacgacgctggctgacgcccgccggcggcgccggcattgtggttgcggtaccggccagcggcgccccgccaggctgcttccagccggcttcatcctgcggcagatcgacaataaacagctcaggcactttatcgccattttccgccagcgtatcgccaataaacgccagagtatggttcccgacccagccctcctcataggcgcgattaatctcatcgctgcccggcgcgggtgccggcgtcgtgcggcttaccagcacacaccagtggctgccgccatattcgcgcggatgctgtccctgcggcgtcaccggtccatagggcgccgccacgccgacgttgcgcagatccagcgccggatcgcgctggtgcagcacgtgatcgttgtaggtaaaactgacaaactgaccgttggggctatagacatggacgtggctgccgccgcgcagcgcgccgggcgtgtaggggggggtaatgtccatggcgtccagattctcgacagccccctgaaaggccaccaccccgcggcgatgatgaaaatcatactgccactgcgcatccggccgctcggggccatgaataaacacatagcgctcctgggttggatgcacggttaccacgcccacgtgcgcgccctgcgtggcacgataaatggtctccacagtaccgctgtttacgttcactcgctcaatggtttcgccggtaaacgatgcgccggacggacgaacgtcgaataccagccactggctgtcgggagtccaggtattaatattggtaagctggtgatgacggggagcaaaagtgacttgtttcatgacgataccctgatgcgagacttacgcatcagggtagcgtatcgcaaaaaattagcctacacgtttcacatcgccgaccagcaggatataagacagcgcgcctatcaacgccaccacggagatataaaccagcgccgggccaaagccgtaatcctgcgccagatagccaatcaccagcgggacggtgatgccgcccaggccgccaacaaagttaaacaccccgccggtcaggccgatcaggcgcatcggcgccagggaggagaccagcgaccaggtgatagacgcaaaaccgttaccgaagaacgccagcgccatcagcgccatgatccagatggggtcgttggtgtagtttgcccccatgatgcaggtggagatcaacagtccacagatgatcggcgttttgcgcgccacgcccagcgagtagccttttttcaccagcttatccgccagccaaccagacagcaggacgccaaaaaacgcggcgaggaagggcaccgtggtcataaagccggccttcagcgcggtgatgcctttttcctgggttaagtagttcggaaaccaggtcaggaagaaccacagcgtcgaggttaccgcgaactgtccaaggtaaacgccaaccagcttgcggtgaaaaaccagcttccagtccgctttcgataacggttgccgcgcctctttcttcaccggcgcatcgccatccaccaggccgccgccgtcgcggatatagtcgagttcggctttactgatgcttttagtcaggcgcggcggttgataaaccttgaaccagatcagcgaccagataatgccgataccgccggtaacgataaacacccagtgccagctcaatagctcctggatccagatcagcagcggcgtgaggaaagccagacccacaaattgccccgaggtataaaacccgacggcggaagcgcgctcgtgctccgggaaccagctggtcaccatgcggttgttggtcgggaaggctggcgcttcgaagatgccggtaatggcgcgtaaaccgataagcgacattaaaccggtggcgaagccttgtagcaacgtcgccaccgaccagccaaatatagcgataaagtaggtaagcctggatcccacgcggtcaaggaaccaaccgccagggatctggcagagggtatacagccaggcaaaggcggaaaatacgtagcccatttccgctttgctaataccaaactcctcctgaatatgcgccgaggcgacggcgaggttggcacggtcaacataacaaataaccacggtaataaagatcatgatgagcgtcagataacggcgacgcccggtttttacagcggtaactgaaatatccatcgcaatctgtctccagattttgggcatagcgaagccgctcaccatgcccggtaatttacagagggtgtttttgttttttattaataactatgttgcgatgcgctaaataattcgtgctggggaaaggcggaaaattttcgcatccctgggagcatacaatagtatgtgaccagggtaagaaaatgcagccaacgcatcaccagtgcgaagtatgacgcgcatttaccattcggcgacagatccatcctcataccgccacaacggatttcgccagtccggcgcgtttttacttaactcaatcacgcgggcctcatcaatttccacgcccagccccggcttcatcagaggtttaaagaagccgccttccatattgaaatcttctttgtttttcacaaaatcaagcagttcggcgcctttgttgtaatggatccccatgctctgctcctggaagaccgcgttatgcgaaacgaaatcaacgtgcagacaggctgccagcgcgatcggccccagcggacagtgcggcgccagcccaacgtcataggcttccgccatgccggcaattttatagcattcggtaataccgcctgcgtgcgacagatcgggttgtaaaatagccaccccgcccgcttccaggacccgtttaaattcaaagcgcgaaaacatacgttcgccggcggcaatgggaatatgggtttgcgccgcaagccgcggataatattccgcctgctcggctaataccggctcctcaataaataatgggcgatatggctccagctctttaattaataccttagccatcggcgcgctaacgcggccgtgaaaatcgagaccaaactcaatttcattgccaaacgcttcacggatttgcgccacggtattcaccgcggcatcaaccgcgcgggaattatcaatgatacccatctcttcgcagccgtttaatttaaaggtgtcgaaaccaatgccgcgcagcttcttaatcccgtcaatcacttcggcggggcggtcgccgcccacccagctataggctttaattttgtcgcgcaccagcccgcccatcagttgccacaccggggcattcaggaccttacctttaatatcccatagcgcctgatcaataccggcgatggcgctcatcataatcgggccgccgcgataaaagccgccgcggtacattacctgccacaggtcattaatccgcgccggatcctgaccaatcaggtaatcgccaaattcatgaacggctgcctccaccgtacgggcgcgcccttcaatcaccggttcgccccagccgacgatgccttcatcggtttcaatcttcaggaacatccaacgcggaggtaaacggtacgtggtgatattggttattttcatttcactgcctctcgatacgcttttacgaatgcggctgcctgctgcgcggtacgttcaaccgactggccggcacgatagagatcgctacccaatcctgccccaacacagccggcattaatccactgcgccaggttttccggcgtcacgccgccaacggcaaagaccggaacctcgggcggcagcacggctttcaacgctttgatgtaatccgggccaaaagccgatgacgggaagatttttagcgcctgcgcgccggcatcgagcgcgctaaaggcttcgctggcggtggcgcagcctggacacacggtcatgccgtaacccaccgctcgccggatcacttccggttgaatgtttggcgtcacaatcagccgacagcccatggccgccagcctgtcgacctgctccggttgcagcaccgtgcccgcgccgataagcgcctgctcgccgtaagcgtcgacgacctgcggaatacttttctcccactgcggcgagttcagcgggatttcgaccgcgtcgaaaccggcgtcgataacggcgccaacgtgagccagcgcctcgtctggcgtaataccgcgcaggatagcgataagtggaaggttagtttgccactgcataagcgatgctccttattcctgtctgaaatgccgtatcgcccgcaaccgcgctgacttcgcggccaatggcggcgaatgcctgctgatagcgggatgttaacgatgacccagcgacgagactgatcgcctgctgtccggcgaatgtgtcgctgagggtggcaacttcagcgccaatcagcaggccggaaagaaattcgctaacctgctcgcgaggcagcgcgcccagcacgtgcgaagcgcgaacttcaaacagctgcggcaggacggcggggttgttgataccgcgctgcagacctgccgcgaatgcggcagcggacgtttcctgcggcggtaagccggcgcccaccagcgagagctgaagcaacagatgatgcaattcaccggtcaaaacggtacgaaaatcgtgaatttgccggcgatcggccagtacccacttgcagtgggttcccggcatcacgtagacagacgaaggggctaaggcgcgagcgcccagcagctgcgtttcttccccacgcatgacgttatggttatcgtcacgggaaacgcaaaggccgggaattatccagatattgtcgccaacggcagttaactgctggccaatatccgagaaagcggcaggaagcggcaaataaggggcgattttccagcccacgttgctgccgaccatccctgccatcaccaccggtgtggcgccatcgcgccagtgctgggtgatttccgctaacaccgcagcgggagagcgaccattcaggcgcgttacgcctgcttcagattgcctgctttccaggcattcttcgccctgataaagccaggcgcgtaaattcgtcgatccccaatctattgcgatgtagcgagccgtcatgtgatttccttaagccttcgtgtcgagctggcgatcatcgtcaacgccgcctgctccgccgcgtcgctatcctgatgccgaatggcgtcaaatagcgctttatgttcctggagggttttcggcatgttgccttcatcgcccatccaggtccgttcaaataccgcccgctgcagcgaactgatcgccacgctaagctgctgtaaaaccgggttatgtactgactgcagcaccgcctcgtggtagcgaatatccgcttcgttaaaggcatcccggttttggttgttggcgatcatgtcattgagcgccgactcgatttccgctagatcgcttgaggtggcgcgttccgccgcccaacgcgcgatggcgggttcaaccaggttgcgcacttcactcatcgcgctgataagacgcgggtcatagtcattttccagtacccactgcagcacctcggtgtcgaggtagttccactggtttctgggagcgacaaacgcgccgcgatagcgcttcatttcaatcagccgcttcgccatcagggaacgaaacacttcacgaatgatgttgcgcgaggtttcaaactcctcacagagttccgcttcggccggaagcgccgaacccgggacgtatttaccgctgacgatctgtttgcccagcgagatcacaatgcgatcggtcttattgagagtcatggagagtccttgtgctctatgtgtactgctctactttaccgtcgctgctgaatttcgcctcatgtttgtactactaacgtgatgctgtacgttatcaacatgagcgtaatgtagtacaacattattgtgttgtactacaatttggatcacaaaaagaacaattcatgaaaattaaagcgcagcggccctgacaagaggcgataagagagaaaattaagggaaggaggcgttaaaacgcttcgccgacctggaagtaaaagccgctgctgccattgccgataccgtagtcgaggcgaacattaacgcgaggtttgaattcaaagcggtagccaacgcccgccgaaggcagccagcggccattattcagcgacgacagtgagggccccatggttcccgctcctgcccaggcgacaatcccgtgccgccaggtgagctgccggcgatattccagctgaccgctgacgacgtttttatcccggtagcgcccctggtagtagccgcgcatccgttcatcgctgccgagcagcggcatcatgctccacggtacctcgccctgggtgaaggcgccatcggcctcccaggcgagcacgcttttctcgctcagggcatgataatggctatagtgcagctgaaattcctcaaagcgggtatcgctacctaatccgggcgcatagtgggtatagcggaggttggcatactgaccccggcgcgggttagggacaaagtcgcgatcgtcccagttgatatcgatgctggcgccggagctgaataccgacggtccctgcggagtgttttctatcttcggccgatcgtcatggtccatctcatcggcattctgcgccgccagcgaccatcccgccccgagataaacatgatcgataagctgccgataaagggtgggtcgcagagtcagtacccgggcggtatacttctctttttcattgtctttatccccggcatgaaaaccctgcccccaataataagtgggcgtgttggctatcgacccttcgacaaaaacgcgccacagatcacgatcgaaaaaggtgtagtttttcacgctgaggccaaaggcgccggtagagctggcgtagccgctgagcgtcagggtcgagttctggctggtggtatcctgcgggtcgggacgatacaggccgacgacagcggtgccaatgcccaaccctagttccggcgtatagaacggaccgggcatcacgccccagtcgatgcctttgctggcgtcgaacttatcgctggcgccgagatgctgcagccagccgtcgattttctcgcggctgagcgcctcggcctggctgcctgtcgggcaggccatcagcagcagaaaagtgataaacagtcggctcaaaagcgatactcgccggcaataaagaaactgttacgttcggcaaagccaaactcggtagtaatattaaaattctgcgtcagctcgtattgcgcgcccaccagaacgttccatggcgactgcagatgctgcttcacatcgaagcgaccgttattgtcctggttggccagattaaccatattctgcagcatcggcgacggcatcgagagatcgctgaggctgcctttaaactcctgctgcacatcctgatacatgctgccaacccacagatttagctttccggcggggagatgcagcgcatcgaccgatggcgtactgaaacgatagccaacgcgcggcgaaaaggtaagcgcatcgatgctgccgtcgaggatatcaaagcgcgtttgcgtgtagttggcgtccagcacggtaaaccaattgccgacgccgcccaccagggtggtgcccatcccgtaggtagtacctttaaaatcgagacgaaagtcgagatcctgcatccccggcaggggcaccactttaccgttcggtcccttcaggccgacagctatctgcgaaattgaatgcccttcggtgtgccccaccaggccataaacgttcataaacggcagcagccaggcatccagcttgagcgtctcggttttgctgctttcccgcgtatgaccaacgccaatctggaaagcgttatccagcgagaccggcccattagcgaaaatgttattcacggcgtgcttgcagacaggatccttaccgcaatcgatattgcggccatccagcgacagcccggtgaagtttatgctgtcgacattaatattctgccgcatatccatatagttaatgctgacgccaaacggcagcggcaggacgtagccgcgctttctggcctcatcgcctagcaaagggagtagcgaggacgatgctgcggccgcaggctggcgactttctggcaccggcagatccgcgggctctgcgccgtgataggcatacgccggttcgagcggcgccgttggttccgcggccgcgcaaatctgaacagaggcgaatggcagcgtaaccaacatcaaacggtggtatatattcatgaaaagtatgatgttagttctgagttgctaaaaagagggcgggtagcttatagaatcccctgcaaggattgagggatttaaatgcggattaacatctgttcatgaaaaaagagaagacagacccggcgaacgccgggccggaaagaagtttacgctaaaacgtatttttcaatggcgaaggcaacgccatcttcaaggttcgatttggtgatgaagttcgccgcttctttgaccgcaggaatggcgttatccattgccacgccgacgccggcaaattcaatcatcgcgatatcattttcctgatcgccaatcgccataatctcttccggcttgatgcccagcgcatcggccagcgacttcacgccagtgcctttattgacgcgtttatccagtatttcgaggaagtaaggcgcacttttcagcacggtgtacttctctttcacttccgccggaatacgggcgatggcctggtcgaggattgccggctcatcaatcatcatcactttcagcagctggatctcaggatccattttctccgcttcgcagaacaccagcggaatggttgccacataggattcgtggacggtgtagtagctgatatcgcggttcgcggtatacagcgtattgcgatccagcgcatggaagtgggagccgacctcgcgggagagctgctcaaggaagcgatagtcgtcatagctcagcgcggtttgcgcgacggtgcttccgtcaccagccttctgcaccagcgcgccattgtaggtaatgcagtaatcacccggctgctccatatgcagctctttcaaatagctgtggacgccagcgtaagggcgaccggtggtcagcaccacgttaacaccgcgctcgcgcgccgcggcgatggcggctttcaccgctggagagatggtatggtcgggcagcagcagcgtgccgtccatatcgattgcaatcaatttaatagccatagggtccccgggtaagatgagtctcccctcatgctaacgcgattccgctcaaaaaacagtaaaagtgtcggccagaaagggggatggaaccgcagcagcggattcctcttttagcggcaaaagaaaagcccgatcgcgcgatgcgaccgggcttatacatcctgttgccccggtaaaactcgttaccgggaaacatgcggcttaaatatcgatattcgccgctttcagggcattctcttcgataaacgcgcgacgcggctcaacggcatcgcccatcagggtggtgaacagctgatcggcagcgatggcatccttgacggtcacgcgcagcatgcgacggctgtccggatccatggtggtttcccacagctgatccgggttcatctcgcccagacctttatagcgctggatggagagaccgcgacgggactctttcaccagccagtccagggcctgctcgaagctggctaccggctgacgacgttcgccgcgctcgatgtaagcatcttcttccatcaggccgcgcagtttctcgcccagggcacaaatacgacgatattccggccccataatgaactcgttatccagcggatagtcggtatccacgccgtgggtacgtacgcgaataaccggctcaaaatgctgcagttctttgttctcgtggagatcgaatttccactggctgccgtgctgttctttctcgttcagctcggagaccagggtgttcacccagcgggtcaccttctgctcgtccgccaggtcggcctcggtcagggtcggctgatagataagctctttcagcagcgctttcgggaagcggcgctccatgcggccaatcattttctgggtggcattgaactcggcaaccagtttttccagcggttcgcccgccagcgccggcgcattggcgttggtgtgcagggtcgcaccgtcgagcgcgatggagatctgatactgatccatcgcttcgtcgtctttaatgtactgttcctgcttgcctttcttcactttgtacagcggcggctgggcaatgtagacgtggccgcgctcgacgatctccggcatctgacgataaaagaaggtcaacagcagggtacgaatgtgcgagccgtcgacgtccgcatcggtcatgatgatgatgctgtggtagcgcagtttatccggattgtactcatcgcgaccgataccgcagcccagcgcggtgatcagcgtcgccacttcctgggaagagagcattttatcgaagcgggctttctcaacgttaaggattttacccttcagcggcaggatcgcctggttcttgcggttacgaccctgtttagcagagccgcccgcggagtccccttccaccaggtacagttcggacagcgccgggtcgcgctcctggcaatccgccagtttgcccggcaggcctgccagatccagcgcgcctttacgacgagtcatctcacgagcgcgacgtgcggcctcacgggcgcgcgcggcgtcaataattttgccgaccacgattttcgcatcggatggattttccagcaggtattcgctcagcagttcgttcatctgctgctccaccgccgatttcacctcggaggagaccagcttgtctttggtctgcgaggagaatttcggatccggcaccttcacggataccacggcaatcaggccttcacgcgcatcgtcgccggtggcgctgactttcgcttttttgctatagccctctttgtccatataggcgttaagagtacgggtcatcgccgcgcggaagccggcgaggtgagtaccgccgtcacgctgcggaatgttgttggtaaagcagtagatgttttcctggaagccgtcgttccactgcagggccacttccacgccgataccgtctttttcggtggagaaatagaaaatattcgggtggatcggcgttttgttcttgttgagatactcaacgaacgccttgatgccgccttcgtagtggaaatggtcttctttgccgtcgcgcttatcgcgcaggcggatagagacgccggagttcaggaacgacagctcgcgcaggcgtttcgccaggatgtcatattcaaattcggtgacattggtgaaggtttccaggcttggccagaaacgcaccatggtgccggttttgtcggtttcgccagtcacggccagcggtgcctgcggcacaccgtgttcgtacatctgcttgtgaactttgttatcgcgctggataaccagctccagcttctgcgacagggcgttaaccaccgagacgcctacgccgtgcagaccgccggaaactttataggagttatcatcgaatttaccgccagcgtgcaggacggtcatgataacttccgctgcggagacgccctcttccgggtgaatgccggtcgggatgccgcggccgtcatcctggacggagacggagttatcgctgtggatggtgacaacgatatctttgcagtaacccgcgagcgcttcgtcgatagcgttatccacaacctcgaataccatgtggtgcagaccggtgccgtcatccgtgtcgccgatatacatacccgggcgcttacgcaccgcatccagccctttcaggactttgatactggaggagtcataagaattcgacatcaacgtttctcgctcatttaatcttgggttaatccgttattttacctttttccacgcggaacatcttcgaatttttgtccgacatgtccataacgtgttcagcgctgatcgcgctgacgaaaacctgcgactgcgtcgctttcaggcggctggataacagaccgcggcgggcatcatcaagttccgaggcaaaatcatctatcaggtacaggcagcgccgcccgctgacgcgggtgaggaactctccttgcgccagacgcagggcgcacatcagcagcttaagctgcccgcgcgacaaggtatcttccaccggcgctccgtcggcgcgaatgcgaaaatccgctttatgcgggccgtgggcggtgtaggttaacattctgtcgcgctcgaaattccgctccaacacctccgcgtagtcggtctctttttcccagccgcgctggaaagagaaggtgagcgtgaattccggtaaaaattgctgacaggtatccgccatgtcttcgacgatagcggcgctgtattcggcacgccagcggctgatctgctccgccagcgggattaattccagatcccaaggccgcagctgggcatagcggctgacctgacgcagcgcggcgttgcgctgcttgaccaggcgcttcaggttgctccaggcggtgaagaatccggcttcgttatgaaagcatccccagtcaaggaatgctcttctgtatttggggccgccgttgagtaaagtaaacccctccggcgtaatcagctgcatcggcatcaggtgcgccagctccgccactttgtggccgtcggtgccgtcgatacgcaccttgctgtcgccctgtttgtctttggtcaggccgatggcggtttcccgctcttcgccctgtaaacgcccatgcagaacaaacgcatcctgctcgtggcggatcacccggccaatttgcaaactgcgaaatgcccggccgtggccaagcgtatagatagcttccagcacgctggttttgccgctgccgttcgcgccaaccaggaagttaaagccgggagataaagcgagatccgcgctttcaatattgcggaagtctttgatgagcaagcgcgtcagtgacatatcagcgttctttgggccagggcgttatcggcgcagccagtttcaacgcggactgcgcgcagaccctggagcgtacacaaagtacgtgacaggggcgagcacagcccaggttgaaaatggcaagtaagatagcccgatattttccactacaatctcataggcatgacgacataggctgcggattgagaggccgcatcctcaatctgcacgctcgacaccgaatccgtcagcagaatgcgtacattctcgcacttcagcgcattcagcacatccagcacatagctaacgttgaagccaatctccatctccgttccggcgtaggtcacatccagaatctcttccgcttcttcctgttccgggttattggcggtgattttcagctggttttcgctaacgtacagtcgcacgccgcggaatttctcgttggagagaatcgccgcgcgcgcaaaagcctgcttcagaatatcgcagcccgcttcgaggtgtttatccggatttttcggcaatacgcggcgataatccgggaaacggccatcaaccagcttagaggtgaagataaaatcgccaacgtgggcgcggatattgttgctgccaatctgcacgcgcagcggggtatcgccgccgtcgagcatccgcatcagctcaatcacccctttacgcggcacgatcaccgaatggttcggcagcgacgcttccagcggcatcgaacagaccgccaggcggtgaccatcggtggccaccgtgcgcagttcgctgccttcggtttcaaacagcatgccgtttaagtagtaacgaacatcctggtgcgccatcgagaactgggtggcttcgatcagacgcttcatggtcgcctgcggcagggtaaactccacttcactctgccagtcatccagattcgggaaatcggcggcgggcagggtcgacagcgagaagcggctgcggccggaacgcaccagcatgcgatcgccttccaactgaaccgcgatctccgcgccttccggcaggccgcggcagatatcaaagaatttccgtgccggaacggtcgttgcgcccgcttcgtgcggctgaaccagcgccacgcgcgccaccatctccatttcaagatcggtaccggtcagcgacagcgcgccgtccgcgacctgaagcagcaggttaccgagaatgggcagcgtcggacgaccacctaacggaccgctcacctgttgcagcggttttaataaatgttcacgttctacggtaaatttcatagcgtcacgaggataatgttctgattaaattggaaaaatcttctttaatgtcgtggctttcttcacgcagctgctcaatcttgcggcaggcgtgcagcacggtggtatggtctcggccgccaaacgcatcgccgatttccggcaggctgtggttggtcagctctttggccagcgccatcgccatctggcgaggacgcgccaccgaacgggagcggcgtttggacagcagatccgctaccttaatcttgtagtactccgccaccgtcttttgaatattgtcgatggtgaccagtttttcctgcagcgccagcagatcgcgcagcgcttcgcgcacgaaatcgatggtgatcgcccggccggtgaagttggcgttggcgataacgcggttcagcgccccctccagctcacgcacgttcgagcgcagacgcttggcaataaagaacgccacttcgcccggcaggcggatgtcgttctcgtcggcttttttcatcaggatcgcgacgcgggtttccagctccggcggctcgatcgccaccgtcagcccccagccgaagcgggattttagacgatcctcaacgccgttgatctcttttggataacgatccgacgtcaggatgatctgctgattaccttccagaagcgcattgaaggtgtggaaaaactcttcctgggatcgttctttattggcaaagaactgaatgtcatcgatcagcagggcgtcaacggagcggtagtaacgcttaaactcttcgatggcgttgttctgcagcgctttaaccatgtcctgaacgaaacgctcggagtgcatatagaccactttcgcgttcggcttacgcgccacaatgccgttgcccaccgcgtgcagcaggtgagttttacccagacccgtcccgccatagaggaacagggggttgtaggcgccgcccgggttatccgccacctgacgcgccgccgcgcgggccagctggttagatttaccttcgacgaagttatcaaacgtgtgtttcacgttaacgttagagcggtaggtcggctccgccggcgccgggacattatcccagccagggcgcacgatcgtcggcgccgcgcgcgcggtctgcacctgcgccgccggaatggccgccgcagccgggcttaccgcccctttctgcagcgagctggcgggcttagcgcccacctcaaaacgcagctgcggggcgtccgcaccgcaaaaatcattgaggagtccattgatattattgaggtatttgtcccttacccagtcgagcacaaaacggtttggcgcatacagtgccagcgtgttatcgctcagttccgcctgcaatgggcggatccacatgctgaattctgtggctggtaactcatcctgcaatcgggcaagacactgctgccaaagcgaaagtgacacggcggactccactcgaacataaaatcgatatcaaagaaaaactgaaacaatcgtgattgttggcacacgtcgacaagaccctgcattagccgaaaagcccctgcacaaaaggggtgacgtgcgaaccgctatctgcggttattacccgctgcggatccggggatcgcgatcgggaccggggatcatagcctaaactgagaaagagatcttgtgtttctcaacagattcttcccgatttatccacaggaaggatcgaaaccgggtaagtgtaatcgatcctgcggggagtgaagcacgatttccgccgcatattggaaaaattaatgagctatgccgcttttgggcggaaacgatctaataaagatccttgcggatccttgcgctttactggccaggccgtataatcccccacccggcgcgtaatgcccgttttcgtcacgcgtctcagcttattttttgtgcgacgaggtgcgagaaataaggaaagagaattgactccggagtgtacaattattacaatccggcctctttaatcacccacgctgaggcgtaagtcgttcgaagttcgttcgggtctacgcaaaagtcagtgaatttattcaagtttaggtagaaatcgccatgaaacgcacttttcaaccgtctgtactgaagcgcaaccgttctcacggcttccgtgctcgtatggctactaaaaatggtcgtcaggttctggcacgtcgtcgtgctaaaggccgcgctcgtctgaccgtttccaagtaataaagctaaccctgcgtggttaagctcgcatttcccagggagttacgcttgttaactcccagtcatttcactttcgtcttccagcagccacaacgggctggcacgccgcaaatcaccatcctcggccgcctgaattcgctggggcatccccgcatcggtctcaccgtcgccaagaaaaacgtgaaacgcgcacatgaacgcaatcggattaaacgtctgacgcgtgaaagttttcgtttgcgtcaacatgaactcccgccaatggatttcgtggtggtggcgaaaagaggggttgccgacctcgataaccgtgctctctcggaagcgttggaaaaattatggcgccgccattgtcgcctggctcgcgggtcctgatcggcctgattcgagtttatcagcgcctgattagtccgctactcgggccgcattgtcgtttcaccccaacctgttctcaatacggaattgaggccttacgcaggtttggagtgataaaaggcagttggttgacgatgaaacgcgtattaaaatgccaccctttacaccctggtggtgacgatcccgtcccgcctggaccatttgataccagagaacactaacgatggattcgcaacgcaatcttcttatcatcgctttgttgttcgtgtctttcatgatctggcaagcctgggagcaggacaaaaatccgcagccccagcagcagaccacgcagactacgaccacagcagcgggtagcgccgccgaccagggcgtaccggccagtggccaggggaaactgattacggttaaaaccgacgtgcttgagctgactatcaacaccaacggtggcgatattgagcaggcgctgcttctggcgtatccaaaaacgctgaaatcgaccgaaccgttccagttactggaaaccacgccgcagtttgtctaccaggcgcagagcggcttaaccggccgtgacggtccggataacccggcaaacggcccgcgtccgctgtacaacgtcgataaagaggcgtttgtgctggccgatggccaggatgagctcgttatcccgctgacctacactgacaaagccggcaacgtcttcaccaaaaccttcaccctgaagcgcggtggctatgcggtgaacgtgggttacagcgtgcagaatgccagcgagaagcctctggaagtctcaaccttcggtcagctgaagcagaccgctgcgctgccgaccagtcgcgatacgcagaccggtggcctgtccacgatgcatactttccgtggcgccgcgttctccactgcggattcgaaatacgagaaatataaattcgataccattctggataacgaaaacctgaacgtcagcaccaaaaacggttgggttgccatgctgcagcagtacttcaccaccgcatgggtgccgcggaataacgggacgaataacttctacaccgccaacctcggcaacggcgttgtcgctattggctacaaatcgcagccggtactggtgcagccaggccagaccgacaaactgcagagcacgctgtgggtcggcccggctattcaggacaaaatggctgccgttgcgccgcacctggatctgaccgtcgactacggctggctgtggttcatctcccaaccgctgttcaagctgctgaaattcatccacagcttcctcggcaactggggcttctcgatcatcgttatcacctttatcgttcgtggcatcatgtacccgctgaccaaagcgcagtacacctccatggcgaagatgcgcatgctgcagccgaagattcaggccatgcgtgagcgtctgggcgacgataaacaacgtcaaagccaggagatgatggcgctgtataaagcggaaaaagtaaacccgctgggcggctgcttcccgctgattattcagatgccgatcttccttgcgctgtactacatgctgagcgcctcggttgaactgcgtcatgcgccgtttatcctgtggatccacgacctgtctgctcaggacccgtactacatcctgccgatcatcatgggcgcgaccatgttcttcatccagaagatgtcgccgaccaccgtgaccgacccgatgcagcagaagatcatgacctttatgccggtcatcttcacggtgttcttcctgtggttcccgtctggcctggtggtgtactacatcgtcagcaacctggtcaccattattcagcagcagctgatttaccgtggtctggagaaacgtggcctgcatagccgcgagaagaagaaatcctgatactcttcattcttcaagccgcagatgcgttggcttcattagttcgccccagtcacttactacagtaagctcctggggcctcactaacttgccgcctttctgcaacttgaattatttcgagtatctacggtagcgttaatgccagagaaggcggtcaatggaccgccttttttacatctacatagagagtcaccatgagccataacgacactatcgtcgcccaggcaacccctccgggacgcgggggtgtgggcatcctgcgtatctccggccttaaggcgcgcgacgtcgcgcaggcggtgctgggcaagctgccgaagccgcgctatgccgactacctgccgttcaacgacgttgacggtaccccgctggatcaggggattgcgctgtggttccccgggccgaactcctttaccggggaagatgtgcttgagctgcagggccacggcggcccggtcattctcgacctgctgcttaaacgtattctgaccctgccgggcctgcgcatcgccaggccgggtgagttttccgagcgcgcgttcctcaacgacaagctcgatctggcgcaggcagaggccatcgccgaccttatcgacgccagttcagagcaggcggcgcgctcggcgctgaattcgctgcagggggcgttctccgcgcgggtgaatcatcttgtggaagcgctcactcacctgcgcatctacgtggaagcggccattgacttcccggatgaagaaattgatttcctctccgatggcaaaattgaagcccagctgaacgaggtgatggccgatctcgacgccgtccgcgcggaagctcgtcagggcagcctgctgcgcgaagggatgaaagtggtgatcgccgggcggccaaatgccggtaaatcaagcctgctgaacgccctggcgggccgcgaagcggcgatcgtcaccgatatcgccggtaccacccgcgacgtgctacgcgagcatatccatatcgacggcatgccgctgcatatcatcgataccgcaggcctgcgcgatgctaatgacgaagtggaacgtatcggcatcgagcgcgcctggcaggagattgcccaggccgatcgggtgctgtttatggtcgatggcaccaccaccagcgccgttgacccggcggagatctggccagactttatcgagcgcctgcccgctaaattgccgattaccgtggtgcgcaataaagccgatgtcaccggcgaagcgctcggtatcagcgaagtaaatggccactcacttattcgcctgtcggcacgtaccggcgacggcgtggaggtgctacgtaaccacctcaagcagagcatgggcttcgataccaatatggaaggcggcttcctcgcccgccgccgtcacctgcaggccctggaagaggcggcgaaccatctgcagcaaggcaaagcccagctgctgggcgcctgggccggcgagctgctggcggaagagctgcgcctggcgcagcaggcgctgagcgagatcaccggggagttcacttccgacgatctgctgggccgcatcttctccagcttctgtatcggcaaataacgtttagtccgtaaacgttcactcacccgcattaacgccgcgttaatgcgggtttttactttccatactcgtccatagtcgtgcggttcatccgcgatttttatgtcctgaattgtgcccatctttaaatcccccgtgtgccattgtttatttttttgagctaaaaatcactcaaatggacacaaaaaacggtaaaaaaacactcaaacatgccttctcatggacacactgtagaggtgagatatggcactttcagataccaaactacgcacacttactcccagaaaccgcccctggcaacttgccgatcatgacgggttggtgattgaagttcttcccaccggacgaaaaatctggcgtttccgctaccgctttgacaacaaatcgcaaaagctcacgcagggcgaatacccggctttctcacttgcagaagcgcggctttggcgtgaaaagtgtcgctcaatggttgcccatggcatcaatcccgcgcagaaaaagcagaaagaaaagcttaaacagaaagacccaacgacagtcaaaacattcgccaaacgctggctgaccgatatcgttgaaaaaagtaaccgcgatccgcgcaacatcactcgcattatcgagaaggacatcattcccatcatcgggaagctggaactcgaagaactcacaactgctcacattcaggtcgtgctcgaccgcatcaaccaacgaggtttggatcacgtcgcgctactgacgcgaaacgtgcttaaactcatgctggcctatgcgatttccaggggaatcatcttcaacaatccggcagccgctatcgaggcccgttatatcgcacaagcaacaagccgcgacgtggcgttaacagcagaagagatcggcatcctgttacgggggatctacacctctaatatgaaacgacgccacaaactggctctgcaactgctgatcatctgcatggtgcgtaaatctgagatgattgaagcgacatggagtgaagttaactttaacgcgctggaatggcgtatccccggcgaaagaatgaagatggataacccgcatattgttccgctgtcaaagcaggcgctggcgatgttcgaagagctaaaatttcttgccggagattccccttacgtcttccccagccgaaacgaccaccgacgcccgatctccaaaacaacgcttaactgcgcggtgcgtacgttggatctgaacgtcagggattttgttattcatgacttccggcgtactgccagcacattgctgcatgagcagggctacaactcaggctgagtggagaaatgcctgacgcataagatcagcggcgatcgtggtgtctacaaccgcgcggagtacctgaatcagcgccgggagatgcttcagtccagggctgattttgttgatgcgcagtttgaggagggacggaaggtggttatcgggaagtttgggaaggcttatgaaatcactaccaattgacgcatcaaaatcaaattaacaacttagtaacgtataaagaatagttccggcaaatgccggaactatcgatgatataataaatgcctacgcagcgtttagttcattcagtatctcaatgaacttctcatccagctccctccactcttcattacttaacattttatccttgtaagcatgatgagtgagatacagtaaggtttcggtgactccgccatgtttcttaattaagccatctagttttttctgagctttcaaggcttcggttttaaccaaggctctccgcttctcctgaaaaacggcttcaggctcagaaagaatctgagagatagtgtccttgtccattacatagaatgtttgagttgttgcactccgcgctgtaaccgatgtcgtaataacattacagtgctgaacaggaatgaagtatttcttctcaagaatctcaatgatcgctgggagtcgagtcacttcaaaatcagccgtgatattgtttccagcagaagtcaaacggtcaccccgaagaagtgagcacaaaacaacaatctgtgaattcttcatacgattgagcatcaccaaaactgttgggtgagccgaaaattttaacgcaagctcattacgagcgaccgcaggaggaatggttaagtgttccataaaaagcctcttatctattgatatctaaacaataagacgcagaagggaaccacaggaaacactattggtagcagctacgttcggtcaaaaaaaaccaaaaaagctggatacggtgcgcggatatgcataatattatgcacagccaattgcacgccaacagtgcaacactggttactgtaggcggagatcagaaagagtcgccaaactttagatctgatcttcgccttttccttttgctgtcttcctactcatcacccaacttgaagataatttgtcctttctccatctgagtgtctgaatcctgtgaaaactgcttaaccgatgcatcatcatcatcagacagacgaggaaaccctggccgtagtgtgattctgattgcacaggatgaatactcacctgctttattcttttgtcctgcaactccaaaaccaccctccgggattttttttatcatccacaatgatgattcactgtcgtaaaggatatcaacacggtcacctgtttcgataccagttgcatccatggcagtgcgaccaattctgaatcccagttcaacagcaccagtggcgcgtttagtttgagtaacagtaacgtggttgctttgtaccatacggccagttttcgcagccatcgttgatagagatacgaaagccataacaacctccagagatattcaagtgatcgcattgtacgatcgatcagattgtaatcacaacaatttttttatttgtttttactcccttcaatcacaaccaacgaccaactaaatttagataactcaattcttattgttcttcgctttgcggcatatcataccacacagttttatgcgttagtttcctggatccgtaagatactaaaaaatttcgctctctagcgataaatgatggaatcctctgacggcaaagtttttgttgaaagtgagataacttaacttttgttatgcatacattgtaagtggacacttaccaacatttttggttggtgatatcgtaaaatttacttcgacttaaagaagtaacccccgcaaccgttagatttgaacttcattttcataacaaagttacttcttggctcaactaggaaaaattttcaaatccaaaaacagtttcccgcagcttaccccctccccccgctctaccctatccccaactcatagcagtacccctaaaagcttcctgttctaagacgaactgcgacctgtaagaagcgcctttggcggtcagcccccggtcaaccaaggaacgaagcgtggtctgaaactgacctcctgtctcgatacaggtgaccacaccctttatcgctaccctgttgcaagcgtagcgacagacagaacgctgtagagaagtcggacggcattgccgaaggctttgcgtccgtacttcctgctgaatgtgcaaaacgcggcgccacttttaagagcgtaagcgagtgaaagtgacgccagcgcgcagatcagcttcaacccagctactgcctgcaaatccactgcaacaaacaggctgacactcaaacagatgtcagaaattcacttaccaggaggagaaaccagcactaccgaaccgataccggaggacaggtcattttacctgtggggatatacctgcctgagcaggcggctgcattcgtgcatcaccgtaccccgtcatacctcatccgcgcattctccggcgcaccggtatcgttcagcacagcacgctgtgcccaaccgcgcgtcggggaattgagtggagaatagctatgtcgaaacttacaaaacgcatggaaaaactcgccctgctggctggcggcagttttaaaacagtccatgatcccctccgcatcgccgggcgtttaagccagcatctgcacaagctgaatatccagattcaggatctccagcatctgaaatcgtcacatatcgaaagctacgtgatggcgcgacgggaagcaggcattacgccacgcacgctacaaaacgagatggccgccctgcgcaccatccttgctcagtctggacgtccaaaatttgcccaatcggagcgcatcagcaataaagcgctcgggctgggtaacgccagccgggcaggaacgcatctgccattaacctcagaacgctggttgtcggcgctgtctgctcttcatgaaaaagatgaagggctggctctgacgctggagcttgccagagcaatgggtttgcgttcacaggaagcggtgcagtgttgtcagtctctgaagacttgggccgctgcgttagagcgtggagaaaaccgattgcaggtggtttttggcaccaaaggatcacgttcccgtcagacggtggagctcgaacctgaaaggctacgcaacatcctgaaccgggctatacccctagtggcacaacgcgggggacatttgctcaataaacccgatctgcgcgccgcaatgaattactggcgtgccagcgcagttcgcgcagggctgactggcccctatgcaccacacagtctgcgctattcatgggcgcaggaggcgatggcgcactaccagcgacaggggctgagtataaaggaagccagggcgatggttgcgatggttcttggtcatggcgatggtcgagggcgctacatccagcaggtgtatgggaggcaatcatgagctattacgtttctgccgtctccgatcgggcacgcaataactggccgaaaatatttgaacaacttggcattttcattccaccaaatcatcggcatggcccgtgtccctgttgtgggggtaaggatcgcttcaggatggatgatctggaggggcgcggcacatggttctgcaatcagtgcggcgcaggtgacggactggatctggtttcccgcttcttcggttgcgcactggttgcggccgccgaaatggtgcaggacatggatcctgtaccgctggttccgccagccagggaaaaatcacaggctttgaatatggaatcgcgtattaagacactgcttcgtcattgcgaatccggagaagcgccgtatctgacaacgcgaggctggcgacgagcccagtggcttctgactgagcgtagtagccggacaatctgcggcgtacatttcggggcgggtacgctggtattgctaattcgaaatacaggcgcgcagctgacaggtgcgcagttcattcatcctggagggaaaaagtacctgctgcccggtagccatctgaaggattgtttttgcccgctacatcaggcgagccgcaacggtagaccggaaccctggacattggacaacaaaccaccggaaggcatcatcattaccgaaggatatgcaaccgcgcttgcggtcttatgccttcatcattttccggtcattgctgacctgtcggcacacaacctgaaaaatgtggccatcgctttccgggcgtagtggcctgaatgccaccttatcctggctggcgataatgattgcagtcaggagaaaaataccgggttgctgaatgcaaccgccgctgccgaggtagtgaagggctgtgtggttctccctgcagacaccacattgagcgactgggatgaattttaccgtcactacggtgaatccatttcccggattgtgttcaaccagcagcttcctgcaaatctcaggtcgtagtcatgacagcatcagaccgtactcttaccacctcccttccgctgcgccggggctcggaagggtttaacacgagtcaggatctggttaaaggacttatgcccgccggggcgctgtgcagtatttacggccccggcggctcttttaaatcctttctgcggtatcgctggcgtgccacattgccagcggtacgtcatggggcggaaggcgagtcaatcaaggggctgtgctgtttatcgccggagaaggaggaaccggtgtatcgcggaggatccgcgcctgggaactcagcgttaatgacgagatggcgctcgataacctgtttcgcgtcgactgcccgatctttccagccgctccgggaagcatcgaacaggttatcctggcgacgcaggacattaagaacatgaccggaatgccggtacggctgatcatcctcgatacgctggcccgctgttttggtaattcagatgaaaacaccgcgcgggatatgggcgcatttatccagggttgcgacgccatttgttatcatacgcgcgcagcaatgatgatcgttcatcactcgggtaaggatcaggaacggggcgcacgcggttcaagtgcttttcaggctgcgctggatgccgagtttaacgtcaggcgcgagggacgtcgcaacgctatcaccctgagttgtacaaagatgaaagatgcggagatgccggaggtcaccgcctacgatcttgaggaagttgttatctataccgatagcgatggcgaaccagtgacctcactggtgctgaatgacgagccccggcaacctgacgatgacttactgagtagtggcataccacccggcgtccctcatatcacccgcaaccatacggcgctatggcgctgtattaaccaacgcatcagccagaataagccctgtacctgcacgctcttgcgcgacgatctatgggctaagggaattaacgtcgagaagaaattttcgcgctggctggagaagctgctgcgcgagcaattgattgtgctcgatggagaacagatccggctcccggatacgggggaatgatggtagaactcggaatatgtggggggatacactgccaagtactcgactccccccacattattcacatttaacagcgaaagatgggggatgccctttcaacccgcgccattactgtgaccatggaattcacctcagagaatatgggggagccagccaggaaaagcaggtgggggaaccaaccacaacatctgtccctgatgctgtggtcgctgtaagaattactgaggtaatttctcgtctctaagccgtctgatctcatcctcttcaaaagcatcccttaatagttgtagctggtcggcaaggatgagaagcaacgcataattcgggccgatatcgtcaggatgctcaagcatcacatgcaccaggactcgcgagcgatcgaccagttctctggctgagggttgttctacggtgattttcatagatacctccggcggaggctggtgcaacaggagaatcagagacaggacgcgccagtagcactgcaaacatcgctaccgacactcgagataattcggaacgccaattccggctgcggttttgccgcaacgtggggactatagcgcaagtcagcacgcaaaaactatgcttatcacctcatattaagggcgattttatgcgcgccgcataaacaatgcgacataactttttttcatctttagaggtacgaacagatgctaatttgaaattgatatgctgtataattaaccagttaggtcaagttgataacttctgagaccactctgattaaaacaaagaaccagtcagtaggcacattccaaaggagccttccattatgcgcgtcaccgcaactcatctagtccagtggtcagacaagcgtgaagcacaaggaatgcttccaatcctggtaaggcggcttatatctgttacatcacgtattacagccattaccatgccaggtggtgattcggtgaatgttcctggctgggatggtgttgtcgatgttgcgcaaggaaatccctgggttccagatgggctcagctactgggagctaggcacctcaaaagatccggcatccaaagccaacagcgattttgagaaacgtctggaacagatttcatctgctcaaaaatcacaagcaacctttgtttttgtaactcctcgtcgctggccaggcaaaagtacttggcaggaacaggcaaggaaaaaaaatgcctgggcggatgtactagtttgggatgcagatgatctggaagcatggctggaaacctctccagcgaccagtttatggctaggcatgcagcttgatattgccggtcatggcattgaagcagtagaaaactactgggagcactggaaaaatcaatcctgccccgcaattactgcacctgcgctatttcatggtagagagcagtcaaagcttacgttacaaaacaatattaatcagcatgacccgttgataactgtaatggctgacagtcagtccgaagcagttgctttcgtttgcgcattgttgattgaagaaggccatttcttacgtgctgcctgtataacttcagaacaaggatggcagttcattgatgctaatcccggcattgaattggtggtcattaccaataaccagttgagcaagagacgagccccacgcgaaggtatgagcttaatagtaccgatggcatttggagaccaggccttcaatctcatgggaattgggtgccaagcaatagatcagaaaatagtggaacttagacgtccacaacctgaagagtttgaaaaatccctttgcgagcttgggatcgcatcctctgatgccgcacggtatacccactcactgggaaggtcatggacggtttttcgtcgatggcatgcgcaaaatcctgtgttcaaaaaaccagattggattgaaggtgccaacgccaaaaatttattgctacttaccctcgtgggtgcttggaatagcgactccgaaggggacagggcttgtgttgagcagattgccaaccgcacctacgaagacattgaaaatgagctattaagtttagctgcgcttgatgatgcaccagtcgtaaaaataggttctctctggaaagcgaaagcgccaatggagctattacatctaatggcccccaaactaacgaacaccattctggcaagattctttcaggtagctcgagctgtatttgaacaaccagatcctgtgctggaactggaagaggacaaacgatggatggcctcaatctatggcaaagttcgcgaacaatccggtgttgttttggaggcaatggcggaatcaattgccaaactcggctatttttcagacaattttcagcatgttgttattggcaattctgtacgaggctttattactcaactcctggaagatgccaatgaagaacgttggctctccgtttcattctttcttcgagcgctagcagaagcggctcctgatgagtttctgaacgccgttcaaaacagtttgcatagccctgataaaccagtcactcgcctgattaaggaaacaacatcatcaggtatatcaggccgctgctggcatgccagcctactttgggctttggaattgctggcatggtatcccgccagactcggacgagttgcgagtatccttgcggaactatcaaatatagaaataaaggggaattggggtaatacaccatttaataccctggtttccttttttcgctcttggtatccacaaacagccgcgtccgtcgatataagactccgagcgctcagaaatgtcgtcgacaaatatcccgaagtagcctggaaacttttgttggccctactacccaaccgacatgatatggtttcacccaatgcaaaacctcgctggcgtgacgatgatgcgggtactaacgagagcatcacctatggtgagattcaacgattcatactacctgttgctgatttattgttagagaaagctcaggacaatgcccaacatatcgctgatcttgtcccgaaaataaatgatatggataccaatttcagagaaaaggtaatagaactggtaggtaaagctacaactttacccgatgatcagcgagaaacagttcgcactgccgtcagacaatttctgaactgggaaaactcttttaaccaagacggtgataaacacgatcgatattcagctgatgtgttgagaccattttttgacaagctagctgcggatgatctggtagtcaggcattcatggattttctccaatggatggattgaactcccagacgggcatgaagaagatcatgaaaaagcgaacaagacaagaaatgcattgcgcaccttcgcccttcgagaaatattccaagcattgggttggtctggtattcatagactagctaaacgttgtggagatccgcgacttgttggctgggagcttattaaagaaccattcgaacgtgaagaaatggcggaatggctgtgtcaatggtatctggaggcatcacagggttcatcgttatatgattcactgaccagcggtgtacttcatgcgctacctcaagcagaactccttgatttcctcgatacatgcttatctcaactcgagcaaaaatccgcctcttccgaaaagatggctggtttcatggtaaatgctccgcaaggaatgagcttgtggcaacttattgaaaatcaatatcaaatgcttctcgatcatttctggttgaatgttcgaccgtcttatttgcagtcgaataaggagcaattgctcttttgcatcgaaaaactacttgccgcaggaaggccgcgaacagctataaatgctatgggagatcgttctagcgacttaccaggggagtcgctaatcctgattctaaaaggcatcgctgctggccaagaagaagatgccgaattcccgcgttcatggcacatttctcgtatattcaaggcgcttactgacgcaggatacaatcctgcagaaatggtaagtctggagttcatttactatccactacttaaaagagacgaatatggcgcaccatatttaatggctgaaatactgggtaatccggatttttttatagagctcatctgtctcgcttacaaacctcataatacagcacgcgaacctttacctgagcatctacaaacagcagctcgaacagccagtagtctactccacgaagaacacggcgttcccggtatggaccacaatggagaaataaatagtgaattatttttctcatggatcaacagagttcgagagttggcaaaagaaaacgatcgggaggttgtcacggacctgactatgggagcctggttttctgactggcctttaaataaaaatgttgaatgttggccacacccaatcattgccgatttattggatcaggatgaatgcaaagacattaggcgaggtttcaaaaccggagttcataacactcgaggtgtcactacccgtatgctatatgacggtggaacgcaagaacgacaggtttcggaaaaattcagatatttagcgaaccattggaaggatactaaacctaacgttgccatcatgatcgaagctcttgcaaaatcttacgagtatgaagcgcagatgcatgatgaagatggtttatggaatcaagaatcatgaaaatccaaactaaacaaatgattactgaaaaaaaacgatctatcagtagaacatctgaatggggttaaaaagagtattgcgttgtgtaacaagcgaactttctgcagtaacactaggcagaagtactggttattcattatatacttttgtgtccttgaatgtgcccatagccatggtttcaaggcaatgtatcgctgatagattatcgagttagttcgattttccagcttctgtatcggtccgtaaacgttcactcccccgcattaacgccgcgttaatacgggttttttcttgccctttgcggcgcaacgttctctacttttatctccccctctgccgcgagactaaaacatgaccgttgaatataccgtgatcgagaaggtgccctccgccgaagcgttttgccacctgcgggtagccgccggcatgtcgccgcgccccctggaaggcgccagagccggactgccgcatagctgttatggcgtacatatcctctggcaggagacgccgatcgcgatgggacgcatcgtcggcgacggcgcgattaatttcgatattgtcgacgtcgccgtcgatccggctcaccagggaaaaggccttggccggctggtgatggagaagctggtcgcctggctggacgctaacgcctttgatggcgcctacgttacgctggtggcggatgtgccggaactgtacgcgaagttcggcttcgaaagcgttcgcccggagagcgaggggatggcccgcgtctggcgaacccgcagtcgttagctcgcatttcctgccaggaaaagagcgttgtccaaatggcaactcgtcttacggcgcgttcctcactatgctgaacgccattcacatcgcgaggatcccatgacacgctttcttctctgcagctttgccctggttctgctctacccctccggcatcgatatgtatctggtcggcctgccgcgtattgctcaggacctgggggccagcgaggcgcaattacatatcgccttctcggtctatctggccggtatggcctctgcgatgctgtttgctggccgcatcgccgaccgctcggggcgtaagcctgtcgctattgtaggtgcagcgatctttgttatcgcctccctgatctgcgcccaggtgcataccagcagccacttcctcatcggacgctttatccaggggatcgccgccggcagctgctacgtggtggctttcgctatcctgcgcgatacgctggacgaccgtcgccgcgccaaggtgctgtcgttgctcaacggcatcacctgcattatccccgtcctggcgccggtgcttggccacctgattatgctgaaatatccgtggcagagcctgttctacacgatgaccggcatgggcgtcatggtcgctgtgctgtcggtctttatcctgcgtgaaacgcggccgacggcgcctccgcaggcagcgttaccgcagcatgacgctggcgaatcgctgttgaaccgctttttcctcagccgcttactcattaccaccctcagcgtgacggtgatcctgacctacgttaacgtctcgccggtactaatgatggaagagatggggttcgaccggggaacttactcaatggcgatggctctgatggcgatgatcagcatggcggtctccttctcaacgccgttcgtcctgtcgctgtttaacccccgcaccttaatgctgacctcacaggtgctgtttctggcggcaggcgtgacgctgagcctcgccactcgccaggccgtcaccctgatcgggctgggcatgatttgcgccggcttctccgttgggttcggcgtcgcgatgagccaggcgctggggccgttcacgctgcgcgcgggcgtcgccagctcggtcctcggcatcgcgcaggtgtgcggttcatcgctgtggatttggctcgccgccatcatcggactcagcgcaatgaatatgctgatcgggatactcattgcctgtagcatagtgagccttgttttgttactggtcgttaccccgccgcgggttgcgcaatacgatgaagaagccgctgtcgagtcttgatcttaatttactcctctgcctgcagctcctgacccaggagctcagcgttacccgtacggcgaagcggatgaacgtttcgccgtcagcggtgagcaagtcgctggccaaactgcgcgcctggtttgacgatccgctgtttgtgaaaaccccgctgggcctggcgcccacgccgctggtcagcagcatggagcaggatctggcggactggatgcagatgggcaaccaaatcctcgataaaccgcaccataccatgcccagcggcctcaaattcgaactggcggcggaagcgccgctgctgatgatcctgtttaacaccctctctcagcgcatctatcagcgctatccgcaggcattgattcgtttgcgcaactgggactacgactccctggacgccatcatccgcggtgaggtggatatcggcttctgcggacgcgaaagccatccgcagtcgcgtgagctgctgagcctactgccgtggtatatcgattttgatgtgctgttcaccgacctgccgcaggtctggctgcgcgccgatcatccggcgctcagggaagagtgggatctggcggcattcttacgctatccgcatatcactatctgctgggaacaacgcgatacctgggccctggacgacgtgctgcaggagctggggtataagcgtaacgtggcgctgaccgtgccggggtttgagcaatcactttttatggccgctcagccgcagcacaccatgctggccaccgcgccgcgctactgtcagcactataatcagcagcaccagctgccgctcgtctcccggccgctccccctggaggcgcagcatctggaaaagctgcgcgttcccttcaccctgctatggcataagcgcaacagctacaacccgaagcttgtctggcttagagatacgctgaaagcgctctattccggtacgctttaagccttgtttcgtgcccatagcaccttatttgcgcaagaatttgtaaaattcaaacaaattcccttttcaatgggggatttcggcattaaaacctgttaataccaggcgataatagcgcccgcagttttatccagaccattactcacggagcgacgtatggcaacgcattttgcaagagggatactcagtaccggggagccgctatcgacacgtttgtcagcggcctgtcatcaatccgcacgtcttctcccgacatatcgccaggctcgcttttgcgcgtcgcgctcgctgcttgccgagctgctgtttatgctttacggcatcagcgagctgcctgaaatcatcaacgaagccaatggccgaccggtttttagcgatcgccaactcccccgcttttcgatcgcttatactggcaatatcgttggtgttgccctcaccaccgagggggattgtggcctcgacatggaactgcagcgcactgtccgcagccacgacgccgaccggcacaatttcagcaacaatgagaatctgtggattaacatacagcatgatccggacgaagcgcgcagccagctggtagcgctgcgccgcagcgtgctaaagctgaccggcgaagcatcaacgcagctgcagctgctgcccggctctggccgcctgcgcaccgccggcagtcagccaatcgaagcggtatgtgacgccgaatcgctgctggtatggtccattgccgcaaccccgaacatcggctcgctgaaggtctgggaatatgatgctaagggaggtgactggcgcagcctggcggatgcgcagcagcgcgcacgcgaaccgtcagcccgcctgatgcgctttaccagcttacccatggaaaaaaccttatccctcaattgaccggtcttgccggcatcatgatccaaaggagcaatcatgtcagataccttgaaagtggttacgttactcggcagcctgcgtaaagggtcgtttaatggaatggtcgcgcgcaccctgcccggcatcgcgccagcgggcatggatatctccgcgctgccgtcgatcggtgatatcccgctgtacgatgctgatatgcaggaggaagaaggttttccgcagcgcgtgcaggagattgcgcaacagatccgcgaggcggatggggtagtgatagtcactccagaatataactattccgtgcctggcggcctgaaaaacgccatcgactggctgtcacgcctgcccgagcagccgctgtccggcaaaccggtactgattcagaccagctcaatgggcgccatcggcggtgcgcgctgccagtatcatctgcggcagattctggtcttccttgatgcgatggtaatgaataaaccggaatttatgggcggcgtcatccagaacaaagtggatccgcaggcgggtgaagtggtcgatcaaagcaccctcgaccatctgcgcggccaactgaccgctttcggcgactatattcggcgggttaaagcataaaaaaagcccggcagcgatgccgggctttttcatcatgcgtgcggattaatgtgcatcgataaagacaattttcagcacgaacagcagcgaaacgataatcacacacgggctgagctcgcgcagccggccggtaccgatcttcatcacgcagtaagagataaagcccagggcgataccttcggtgatcgagaagctaaacggcatcatcactgcggtgatgaacgcaggcaccgcctcggtcaggtcgctccacttcacgcgcgcgaggctggaggtcatcagcacgccaacgtatatcagcgcgcccgcggcggcatagccaggaaccatccccgccagcggagagaggaaaataaccagcaggaacaggataccaacgacaacggcggtcaggccggtacgcccgcccacggaaacgccggaagaagattcgatataggccgtcaccgacgaggtaccgatgaaggagcccgccaccgacgagacgctatcgacaaacagcgcttgcttcatgcgcgggaatttaccgttggcatccgcgagacccgctttatccgtcacgccaatcagcgtcccggaggagtcaaacaggttgaccagcataaaggagaagatcacgccggccaggcccaggttcagggagcccgccagatcgacctgaccaatcaccgaagccacgctcggcggcgccgagacgatcccggtgtaatgcacgtcgcccagcatccagcccagcagggtggtcacaacgatagagaccagtaccgcggcgtgaatgttgcgcgacgccagaatcgcgatgataaagaagcccagcacgcccagcagtacgctgtgggaagtcaaatgaccaatgctgaccagcgtttccggattggcgacaatcaccccggcgtttttcaggcccatcatgccgataaacaggccgataccgctggtgatacctacacgcaggctaagcggaatattggcgatcatccagtaacgtacgcggaagatggtcagcagcagcaggcccacggcgccccagaagatggcacccatgcccacctgccacggcagccccatcgcctgcaccaccacaaaggcgaaaaaggcgttcaggcccatcgccggcgccagggcgaccggcaggttcgcgaacagacccatcaggatactgccgaaagcggcaatcagacaggtggtcacaaacacggcgctggtatccatgcccgctacgccaagaatttgtgggttaacaaaaacgatatacaccatcgtcaggaacgtggtgaaaccggcgatggcttcggtgcgcaccgtggtgccgtgctcgcgcagcttaaatacgcgctccagcagaccctcgccagaagactggctggtttgttgttgactcattatcggtttccgaacgtaaggagggaaaattcgaggctatcctataccaaattacggcaccaggcgcggttgtatggtaatttttttcatttattttgcttatacggcaacgattgcgtcgcggcattgagcattacgaaaacgttaaacttgttaatatggaaaggctatgactcaaccagaagcagtattttttgactgtgacggcacgctggtcgacagcgaggtgatttgctcccgcgcctacgttcacatgtttcaggaattcggcattacgctggacctcgccgagatttttaagcgcttcaaaggtgtgaagctgtacgaaattatcgacaccatcaacgctgagtatggcgttaatctgcaaaaggccaccctggagccgatttaccgggcggaggtcgctcgcctgttcgatagcgagctggaggtgattcccggagcccaggcgctgctggatgcggtaagcgtcccgatgtgcgtggtttccaatggcccagtcagtaagatgcagcactcgctcggacgcaccggcctgctgcgccatttcactgaccgcttgtacagcggctacgatattcagcgctggaagcccgacccggcgctgatgtttcatgcggcagaggccatgcaggtaaaagccgaaaactgtattctggtggatgactccagcgccggcgctcagtcggggattgccgccggcatggaagtgttttatttctgcgccgatccgcacaaccagccgatcgatcatcccaaagtgacgacctttaccgatctggcagagctgccggcattgtggcaggcgcgcggctgggatatcacgcgttaagggcctggtgagcggcacgttggcattgatgaacccccgctatgcgtctgcgtaagcggggaatagaactagcggctttttattgctgcaactccgccgccgccgctttatcggcaataatcaccagtgaagggtgcaatttgagcactgaagccggcacctgcacgctgaccggaccttccaccacttgctttaacgcgtgcgcttttgccgcaccgctgacaattagcaataaatttttcgccgccatcacgcttctcggccccatggtgacatagctgtctggtactgccgagatatccccgcccatctcgctgttagcgataagagcaatcatttccccatgaatcggcacttcgaccgtctgatcatgaaagcgggtggtattcggcaggttgccgcaaaaatggccgtcggcccccagccccagcaccatcagatccagaccgccagcctcttccagctggcgatcgtgctgagcggcgttgtccagcgtcagcttgtgaatgttctcttctttgatctgcgccggggtaaaaaacagctggcgcaaattagatatcgtgacgccttctcgcgactggccgcgaaaagggatctcatcgaagttgtaatagtgcacccgatcatagaatgctttgcctttcacggcggcggtcaaatgctcatacatccgctttggcgtgctccccgccgtcaccgccagattcacccgccgcggcgccgtgatatagcccagaacataatggctggcgaccaggctcatctcttcataatcttcggtcacaatcattttcatcttgtcgtccttcacaagcacaaaacgggggctgaaggccccctaaaggttatttaaacagtttttgcacaaactcggcgtaggccgggcgccagacgtccatttcatggttcaggccgggatactggtagtaatcaaatttaatctgctgtttttccagctcgcttttcagaccagcaatgtctttaccggtcacagaatctttttccccgacgaccacggtaaagttacgcagctgcttattgatcgcgtcaggctgcttcagctgcgcttccacgccggcattcggcaccgtggtagtcgtaacgccgctaaaggtggcgagccagccaaagctctccagatgattcattccggaaaccagcgcctgataaccgccctgcgagaggcccgccagcgcccgaccgtcggcatctttacgcacgttaaatcgggcatctatcagcggaataatatcctgcatgagctctttatccgccgcctgcgcattaagtggatagaaggttttgcgccgctcctgcggcgggaagttttccgcgaccgcttccgggatatcggtttcggtatccgggaccaccaccagcatcggcttaatcttgccctccgccagcaggttatccatgatttgcgggatccgcccctgatcgatggccgacaggccgctgtcgccaaagccatgatagaaatagagcaccggcagcggatcgccggttccgctatagcccggcggcgtccagacatagagacgacgttcggcgttcagagccttcgagtgataggtgagggtgcgcagatcgccatgcgcaacctcccgatcgtcaagaatactgcccggcaccagaatcaaactggtgttcacctggcgctgcggcttctgatagcggctgccggtatctaccgagcggaagccatccacatcgaaatagtattcatagagattgggcttcatcggctcgcttttccatgtccagactccgtccgctgccttggtcatgtcgtgcgagacaaaggagtccggcgtggcgccagtcactatcgagacccgccgggcatcaggggcaaacaagcggtaggtgatactcttatccgcgttaacctgggtgataaagtggctcaccggcaggcttgggtccggcatcgcgggtaatggcgccgcctggagggtaaacgccgcgcccgccagcgccagggcgaaataaattgcatgtcgtttcatcgttgttcctctttcgttgtgtccgttcagttatcgtctcaccaccagatttccgcctgcgcccccacggcaaactgatcgttcttcccgtcttcaaaaatgctggtggtattattcgcggccttatccaggtcaatatccttcgctttaatataggtggcatagaaacgaatttccgggcgcgaggtcagcatactggtattgactttgaaggtatggaacagcgtggtcttgtagccggactcgttatatttcttgccggtaacatctttgttttgctgtttgaagtaccccagctcgacgccggtctggttatatttatcccagatataagccggtcgcagaaccgtacggatagattcaaaatcggagtgggccccggtttcgtagctatagacgtcgttaccaaaagagtagacgatggcattcgccataataacgtcatcgcgtaaataggtttccccctgcgaggttaagcgcacggcggtgccattggtatgatcgccataatagcggccattaaaggtggtataggggctggatccggcatagcgtgagaagctgctggcaatagagttattggccagtaagaaagagaattcgttaaagccgccgttagcaaatttctgcgttaacgaggtaccagccatccaggtatctttccacggataataaccttcattgccctctttatatttctcagaggaactttggttggcggcgacatagcgtccgctaaccatcaggctggctttatcccacagcggaatctctttgtagcgaacgtccagggtgttggtgttaatttgctgcttattgcttaaagaacggtcataatcatcgacatcttcgcgaatcaacgcgatatcgaatttcccggcgcccacctgccagttttccagccctacgccggccgccgcatcggttctctgcgttttccagtccagcatctggatttcaatttttggcgccccgtgtttgccgacccagaaatcggcttccggcgcaaacggcaggaaccctttggtgttaacatacatatccgagaattgaatgtagttttcgccgccggcattgtcaccaaaccagccagtggaatactgctggccgacgttcccgtcgagcatcacgatggcgtcgacgcgtttatcgccttcctgaaacacccgctgcttcagctgcagatcgaaccagccggaatattcattgcccaggcggccaagcgaaccgatcgcccatgattttggcgagccgtgcgaggcggtcccccagccggaacggaagtagccgttatagctaaagccaatttcatctttcacgaacttgctaaagtctttcagcgtcatcgcgctgtaggctggcgcgccatcggtgacaggttgttgatttttaaccagcaccgcatccggtttaaccgccgttttcggcccggcggtcgcccccccggtcttgcgcttctgaccttccgcaggaggagaccatgaggcccaaatctggtctctttttctttcctggtcctgatattttttgagctctttttgcgtgtctttgagcgctttttccagcagctcaagccgttgttccaccgtcaactggctcgctagcagattagttgaataacaaagtggcgccagcaagactatcgccgaagcgatcctgttttttctcatcataatattcccttatataatcattggcgtaaataaaacacgacaacaaccctattccgtgccggtgctaatagccgtatccataccgtttgacgtcgcggcggctgttatttttgcggttagacaaaaacaaaaaaacctgaagaagaccatctgccttggcagataatcctcttcaggttttgcccgcgcatcgcggtagcaaccctcattcagccattattggcccgcataaaacaaaaaacctgatatcgcccccaggagcaatatcaggttttgcctgctgtcgcagtcacaatccgtttaaaccatcctgagcgttaaaactcagtgagtggcagctgattgttacgcgataaaatgaataactcaaacgggcagattgttaattgtgacgataatctcagcaatctcgctgccgcggggtaaaacatatctaattctgataaatccatttaccagaattagacagaatgattattactctttcggatctttgccagcgagcagtttatccagttcatcgccgccaacgtgacggaaatcctgacctttgacgaagtagaaaatatattcgcagatattctggcagcggtcgccgatacgctcgatggagcgcgcgcagaacagcgcggtcaggacgctggggatagtgcgcgagtcttccatcatgtaggtcatcagctgacgcacgatgccttcatactcctggtcgactttcttatcttcgcgatagatacgtaccgcttcgtcgagatccatacgcgcaaacgcatccagtacgtcatgcagcatctgcaccgtgtggcggcccagcgattcgaggctcaccagcagcggctggtgctgctgggaaaacttctccagcgcggtgcggcagattttatccgccacgtcgccaatgcgttccagctcagcgatagtcttgatgatcgccatcaccaggcgcaggtcgctggcggtcggctggcgcttggcgatgatgcgcacgcacgcttcatcgatagccacttccatcatgttgacctgcttgtcgccgtcgatgacgcgtttcgccagatcgctgtcctggttatgcatggcggtgatggcatcagagagctgctgttccaccagcccacccatggtcatcacctgggtgcggatatactccagttcagcgttgaactggccggaaatatgtttgttaagatttaggttgtccatggtgtctcctgattgcccaactggtgagagcctgaaagcacaagggcaaatcaaccgtagcggccagtaatataatcttcagtttgtttcttcgcgggcttagtgaacaggtcatccgtgttgctgaactcaatcagctcgccaagatacataaatgccgtatggtcggagcaacgcgcagcctgctgcatgttgtgagtcacgataacgacggtgtagtcctgtttcagctcggtgatcagctcttcgatacgcccggtggagatcgggtccagcgcggagcacggctcatcaagcagcagcacttccgggcggatcgcgataccgcgggcaatgcacagacgctgctgctgaccaccggagagagaatacccgctctggtgcagtttatctttggtttcgttccataatgcggctttggtcagcgcccactgcacgcgctcgtccatatcggcacgggacagcttttcaaacaggcgcacgccgaaggcgatattgtcgtatatggacattgggaacggcgttggtttctggaacaccatgccaaccttagcgcgcagcagggcgatatcctgggtgttagtcagaatgttgtcgccatccagcaggatctcaccttccgcgcgctgctccggatacagttcaaacatcttgttgaacgtgcgcagcagggtggatttaccacagcctgacggaccgataaacgccgtcacctggtttttggtgatatccaggttgatgttcttcagggcatggaatttgccgtagtagaagttcaggttacgaactgaaatcttacccggagctgtattcaccatactcatctcaatctcttcctcattcagcgcagcagttgctgcgctgcaaaaaattaaccgtgtttcttcttggcgaagataacgcgcgccaggatgttcagcagcaagacgcacagggtgataatcaataccccggcccatgccagttgctgccactccgcaaacggactcatggcaaatttgaaaatggtcaccggcaggttggcaatcggctgcatcatgtcggtgctccagaactggttggacagcgcggtgaacagcagcggcgccgtttccccggcgatacgggcgatagccagcaggatcccggtcataatccctgagacggaggctttcagggtgatcgccgagatcatcttccacttcggcgtccccagcgcataggccgcttcacgcaggctatccggcaccagcttcagcatgttttcggtggtacgaataacgataggcacctgcagcagcgccagcgcgataacgcccgcccagcccgagaagtgctgcatctgcgccaccacaatggtgtagacgaacagacccaccacgatagacggcgcggaaagcagaatgtcgttgataaagcggatgatttccgccagcaccgacttgcggccatactccgccagataaattccggcgaggatacccagcggcgtaccaaatacggttgcccacaggatcagcaggccgctgccggcgagggcgttagccagtccaccgcccgccgtattcggcggcggcgtcatttcggtgaacagcgccagactcatgccgtcgaaaccgcgggttatcgtcgccatcaggatccagataagccagaacaaaccaaacgccatggtcgccatcgacagcgccagagcgatacggttcttcatgcggcgtttggcctgcatcttgcgacgggactccgccagttcggcggtagtttgcaattcaatggtcgccattagcgtgccccctcattcttcgcgaggcgcataatcataaacttcgacgcggccagaacgataaaggtgataacgaacaggatcaggcccagttccatcagcgccgccacgtgcaggccggtttccgcttcggcgaactcattagccagcgcggaggtaatactgttccccggcatatacaacgagatgctgtcgagctggtaggtgttgccgatgataaaggtgaccgccatggtttcacccagcgcgcggcccagaccgagcatcaccccgccgatcaccccgtttttagtgaacggtaaaacgatgcgccagatcacctcccaggtggtgcagccgatgccataggccgactctttcatcatcaccggggtctgttcgaaaacatcgcgcatgaccgcggcgatgtaagggatgatcatgatggccagaatgacgccagcggcgagaataccgataccaaacgccgggccggcaaacagcgcaccgacgaacgggatggtcgacagaacgttgccgaccggctcctggaagtaagtcgcaaacagcggggcgaaaataaacaggccccacatgccgtacacgatgctcgggattgccgccagcagctcaatcgcaatgcccagcggacgcttgagccaggcgggggacaattctgtcagaaacagcgcgatgccgaagctcaccggaacggcgatcagcagcgcgataaaagaggtgaccagggttccgtaaatcgggaccagcgcgccgaagatctcgttaggcgcatcccactctttggtccacaaaaaggcaaagccaaacttttgaatgctcggccaggaagagatgatcagggaaacgatgatgccgcccagcatcaatagcacaatcagcgcagccagttttaccagcgcactgaaaatcatgtcaccctttttccccggaggggtaaatgcaggcttggttgcagccatagattactctttacgtattaaaacttgttcgaataaatgcccggtggcgttggctcccgggcctacagtctgaaccgtagggcgggcagcgcctgaacgcccccgccatcttcgtcaaaaatctactgttagtacagcgctttaccgctgctgtctttgacgttggttttccatgccgcgcgaacctgctctaccacgctttccggcagcgtcgcgtaatccagcgcattcgcttctttcccgccgtttttatacgcccagtcgaagaacttcagcacttcagcggtctgttccggcttgttcgtcgccttgtgcaccaggatgaaggtggttgaggtgatcggccatgcattctcgcctttctggttggtcaggtcctgagcgaaagacttgctccagtcaacgccttttgcggcgttagcgaagttgtcttcagtcgggctaaccggcttgccgtcggcagagactagtttggtgtaggccaggttgttttgcttagcgtaagcgtattcgacgtaaccaatcgagcccggcagacgctgaacaaaggcggcgataccatcgttgcctttaccgcccaaaccggttggccagtttacggtagagccggcgccgattttcgatttccactcttcattcactttggacaggtagctggtgaaaacgaaggaggtaccagaaccatcggcgcggcggaccacggcgatgttctgcgacggcagcttcaggcccgggttgagcttagcgatcgcttcgtcatcccattttttaattttacccaggtagatatcaccgagggttttgccatccagcaccagctcgccagatttcacgccaggcaggttaaccgccagtaccacgccgccaatcacggtggggaactggaacagaccttcctgagtcagtttgtcatcagccagcggagcatcagaagcaccgaaatcaacggtgttggcaataatctgcttaacgccaccagaggaaccaataccctggtagttcactttattgccggtttctttctgataggtatcagcccatttggcatacaccggcgcagggaaagttgcgcctgcgccagtcaggcttgctgctgcgaaggcagagaaagcgctcatcgataaggtcgcggcgacaactgttgcgacggtggtacgcataacgttcataatgtctcctgctgggattcgtaaatcattgtttcgaggctatggtgagcaaaataggtcaaagaggtgacagtaaaatgtacgaattatgacagttttatgacaggccgggagagtggattttacgccaaataatacgcttataactcagatggttatctctaatcatgaccgtggaatgacaaaataattttctttttatgacggcgaaatcggaccgtaaaacgatcgtttgtcatctaccgccgccagccaaaatattgcgcacgtaatcgatggaaaacagcaggtgcaaataaaaagggccgccgtcggcagccctttgcaggataggatgctttactcaaccgttaccgatttcgccaggttacgcggctggtcaacgtcagtgcctttgatcagcgcgacgtgataagccaacagctgcagcggaaccgtatagaagataggggcgatggtctcttccacatgcggcatctcaatgatgtgcatgttatcgctaccgttgaagccggcttcaccgtcggcgaagacgtatagttcaccgccgcgggcacgaacctcttcgatgttggatttcagtttttccagcagttcgttgttcggcgccaccacaatcaccggcatttccgcatcaatcagcgccagtgggccgtgcttaagctcgcccgccgcataggcttccgcgtgaatgtaggagatctctttcagcttcagcgccccttccatagcgatcggatactgatcgccacggccaaggaacagcgcatggtgcttatcagagaagcgctctgccagctgctcaatacgcttgtcctgggagagcatctgctcgatacggttcggcagagcctgaaggccgtgcacgatatcatgctcgatagacgcatcctgccctttcagtcgcgccagtttcgccaccagcatcaacagcacggttagctgagtggtaaaggctttggtcgaggccacgccgatttccgttccggctttggtcatcagcgccagatcggactcgcgcaccagcgacgagcccggcacgttgcagatggccagcgagccgagatagcccagctctttcgacagacgcagcgccgccagggtatcggcggtttcaccggactgggagagggtgatcatcaggctattgcgacgcactgcggacttgcgatagcggaattcggaggcgatttccacatcgcacgggacgccggctaacgcttcgaaccagtagcgggaaaccatcccggagttataggaagtcccgcaggcaactatctgaatatgttcaacctgagccagcatttcattggcgttcggccccagttcgctgagatccacttcgccatggctgatgcgcccggtcagggtgttcttaatcgcgttcggctgctcgaaaatctctttctgcatatagtggcggtagatacctttatcgccagcgtcatactgcagattggattcgatctcctggcgtttcacttccgcgccggatttatcgaaaatcaccaccgagcggcgagtgacttcggcaatatcgccctcttcgaggaagataaagcggcgggtaaccggcagcaatgccagctggtcggaggcgataaagttttcacccatccccaggccaattaccagcgggctaccggagcgggccgccagcagagttcccgggtcacgggtatccatgatcaccgtaccgtaagcgccgcgcaactgcgggatagcgcgcaggacggcttcacgcaaggtaccgccttgctccagctcccagtgcaccagatgggcaataacttcggtatcggtctctgtgacgaagacatagccgcgagactgcagcagggcgcgcagcggctcatggttttcgatgatcccattatggaccaccacaatgtgttcagaaacatgcggatgcgcattgctctcagacggttcgccgtgcgtcgcccaacgtgtatgggcgatcccggtaccaccgtgtaacggttgctcttctaccgcctgagccagcatctgaactttacccaggcgacgcacgcgggtcatatgaccttcgctgtcgaccactgccagaccggcagagtcatagccacggtattccagacgacgtaaaccttcgagaaggatttcagcaatatcacgctgcgcgactgcgccaacaattccacacatagttaaatttcctgataatggcgatatgccatgcgttgtcgctgacctgtatttgcccgttttccgggcgccccgagccttgtagagagtggggttattgttatggtactgcctgcggacggggatctatgttgaccctctcatcctggttcgccgggaaaatttccccggcgataatccaaattatttcttcttcaccggacgctgccagccctgtttgtggacctgcggtacgcggctcaacaccagctcattatcggcgatattgcgcgtaacggtggtgccggcggcgatagtaacgccattgcctaccgtgactggcgccaccagctgggtatccgagccgacaaagacatcatcgccaataatcgttttatgcttgttcgcaccatcgtagttgcaggtgatggtgcccgcgccgatattgacgttatcgccaatctccgcatcgcccagataggtcagatgacccgccttggagcctttcccgagacgcgcttttttcatttccacgaagttaccaacgtgggcgccttccagcagttcggcgcccgggcgcagacgggcaaatggaccgatggtgcaggccgcctgcagctgggcatcttccaccacgctgtaggggctaatttcgcagtcatcgccgatggtgctgtttttgatcacgcagccggcgccgattttcactcgatcgcccagcaccacgttgccttccagaataacgttagtatcgatctctacatcgcgcccgtgctgcagcgtaccgcgcagatcgaaacgcgccggatcgcgcagcatcacgcccgccagcagcagcttttccgcctgctccgcctggtagacgcgctccaggcgcgcaagctgcaggcggttgttgacgccttcgacttcgctcaggcgctgcggatgcactgcgacgatctggtgtccttcctggtgcgccatggcgatgatatcggtgatgtagtattcgccctgagcgttgttattggtgagtttcgccagccagcgctttagatccgctccgccggcgatcaggatcccggtgttgatttcctggatctggcgctgggcctcgctggcatctttgtgctcaacgatgcccgtcacctggccattttcacgggtaatgcggccatagccggttgggtcatccagcttcaccgttaacagaccaatcccaccctgtggtttcgcggcgcgcaggcgctgtagcgtctcaacggagatcagcggcacgtcgccatagagcatcaggatgtcttcatcatcattgaagaatggcgccgcctgctgcatagcgtgcccggttccgagctgctcagcctgcagcacccagttcaggttgtcttcatgcagagtctgacgcagcagatcgcccccgtggccgtataccaggtgtaccgcacatgcgcctaaatcgttagcggcatcaatgacatgctgcaccattggcttcccggccagggtatgcagcaccttaggaagatcggaatacatgcgggtccctttgcctgcagcaaggataaccacgctcatcgcactatttgacatactcatcctgacggtagttagaacgaaaagtaaaagcctttcacgttgaaatttctacatatttttcatcataaaacgagacgtggagaaaacgtccaggctcactgttttaccccattttatgacgctatttttaaccactgcaaatcagtttaacgctgaaaaaggagggcggggtggagaatcattaactatctcactgcttttgctgttttttcgccacctgaataaagccgcagcggcaggcgtttatcagcacccacagcgggaagaaccaggataaatattcgccagtcgctggcgggggagggcggtaaagtgattgatgctatccataaaaaacgaaaggccacctatcaggtgaccttcttttcccggtttcacatcgccagtgttgtcgttttgatgggcgatacgtcgtgtcagcgggcgagatagcgcggagcttagaagctcaggacgctaaatttagcgatgattttatggaacagtttcatgatgatttcctgacgcaggtgcagtttataacgctcttttttgtgatatacatcacataaaaagagtttacgcctcatcatttaactaatcaataacaattaagggtgaatactgttttcacttcatccgctcgtcagcagcgggcaataaaaaaagccagcctggaacccagactggctttttacgttcaagccggtgttacatcgcttttttggtcaactcgataacgcgcagtttagcgatcgctttggccagttccgcagacgcctgagcgtaatccacatcgccgtgagagctcttaatgtgctcttccgctttgcgtttcgcttccagcgctcgcgcttcgtcgaggtcctgaccgcgaattgcggtatccgccaggacggtcacgctgccaggctgcacttcaagaatgccgccggacagatagataaactcttcatgaccgtgctgtttaacgatgcgaatcataccaggcttaatggcggtgagcagcggcgcgtggcccgggtaaatacccagttcaccttcgctacccgttacctggattttttcgaccagaccagagaacatttgttgctctgcgctgacgacgtccaggtggtaagtcattgccatatcaccctccgattaaggcgttaaagttttttggctttttccacggcttcgtcgatggaaccgaccatgtagaacgcctgctctggcaggtgatcgtattcgccttccatgatgcctttaaagccacggatggtgtctttcagcgccacgtatttgcccggagaaccggtaaagacttctgccacgaagaacggctgggacaggaagcgctggatcttacgcgcgcgagctaccaccagtttgtcttcttcagacagttcgtccataccgaggatggcgataatgtctttcagttcctgataacgctgcaggatggactgaacgccacgcgcggtgtcgtagtgttcttgaccaacaaccagcggatccagctgacggctggtggaatccagcgggtcaacggccgggtagatacccagggatgcgatctgacggctcagtactacggttgcatctaagtgagcaaaggtagtggctggggatgggtcagttaagtcatccgccggtacgtataccgcctgtacggaggtgatagaaccggttttggtggaggtgatacgttcctgcagaacgcccatctcttccgccagggtcggctgataacctaccgctgaaggcatacgacccagcagcgcggatacttcagtaccggccagggtgtaacgatagatgttatcgacgaacagcagtacgtcacgaccttcgtcacggaatttctcagccatggtcaggccggtcagcgcaacgcgcagacggtttcccggcggctcgttcatctggccgtacaccagggatactttatcgataacgttggagtcggtcatttcgtggtagaagtcgttaccctcacgagtacgctcacctacgcccgcaaacacagagtaaccggagtgctcgatcgcgatgttacggatcagctccatcatgtttacagttttacctacacccgcaccgccgaacagaccaactttaccgcccttcgcgaacggacacatcaggtcgataactttgatgccggtttccagcagttcctgagagctggacagctcttcataggacggtgccgcgcggtggatagcccaacgctcttcttcgccgatgtcgcctttcatgtcaaccggttgacccagtacgttcatgatacgacccagcgttgctttacctaccgggacttcgatcgggtgctcgaggtcttttacatccagaccgcggcgcagaccatcagaagaacccatggcgatggtacgtacgataccgccgcccagctgctgctgaacttccagcaccagaacttcattaccattctgtacctcaagggcttcgtacacgcgtggtacggcatcctgagggaactcgacgtcgaccacggcgccgattacctggacaatctttccagtagccatcttaaatcctctacgaaataacctggttaaaccgcggcggcccccgagacgatctcggtgagttcctgagtaatgctggcctgacgagctttgttgtataccaactgcagctctttaatcaggctgccgccattatcggtcgcggctttcatcgccaccatacgggcggcctgctcgctggccaggttttcaaccacgccctgataaacctgagattcgacgtagcggcgcaggagggtatccagcagcgctttcggatcgggctcatacaggtaatcccaggatttacgtttcagatcagcatcttctgatgccggtaacggcagcagctgagtgatcgtcggaacctgagacatggtgttaataaatttgttgctgacaacgtacagcttgtccagacggccttcatcataggcctgcaacatcacttttaccgggccgatcagttcggacagggatgggttatcccccataccggtcacctgtgcaaccacgttgccgcccacggagttaaagaaagaaacgcccttggagccgatcattgcgaggtcgcactgaacgcctttatcggaccatgctttcatttccgccagcagtttcttgaacaggttaatgttcaagccgccgcacagaccacggtcggtcgacaccaccaggtagcccacgcgcttaacgtcgcgttcttccaggtaagggtgcttatattccagattaccgttcgcaaggtgaccaatcactttgcgcatagtatctgcgtaaggacggctggccgccatgcgctcctgcgatttacgcattttggaagcggcgaccatctccatcgctttagtgatcttttgcgtgttctggacgcttgcgatcttactacgtatctcttttgcgccggccatgagcttctcctcaatgccttgcggcctgccctaagacagaccgccagacgttaccaggactgggttgctttgaaggaatcgaggatgcctttcagcttgccttcgatttcgtcgttatagccaccggactggttaatctcttgcatcagcggagcgtgatcacggtcgacgtaagccagcagagcggcttcgaagctaccgattttcgccagttctacatcagccaggtaaccacgttctgctgcgaacagaaccagagactgctgcgcgacggacatcggcgcatactgtttctgtttcagcagctcggtcactttctgaccgtggtccagctgtttgcgggttgcatcgtcaaggtcggatgcaaactgggagaacgccgccagttcacgatactgcgccagcgcggtacggataccaccggacagtttcttcatgatcttggtctgcgctgcaccaccaacacgggatacggagatacccgggttaaccgcaggacgaataccggcgttaaacaggttggtttccaggaagatctgaccatcggtaatagagattacgttggtcggaacgaatgcggaaacgtcacccgcctgcgtttcgataatcggcagcgcggtcagagaaccggttttccctttcacttcacctttggtgaaggcttcaacgtattcggcgttaacacgcgcagcacgctccagcagacgagagtggaggtagaatacgtcgcccgggaacgcttcacgtccaggcggacgacggagcagcagggagatctggcgataagcaacagcctgtttagacagatcatcgtaaacgatcagcgcatcttcaccgcggtcgcggaagtattcgcccattgcgcaaccagcgtatggcgccaggtattgcagtgcagcagattcagatgcagtcgctaccactacgatggtgttagccagcgcgccgtgctcttccagtttacgcaccacgttagagatggtggacgctttctgaccgatagcgacatagacgcacttgatgccggaatcacgctggttgatgatggcatcgatagccagcgcagttttaccggtctgacggtcgccgatgatcagttcacgctgaccacgaccgattgggatcatggcgtcaacggatttgtaaccggtctgtaccggctgatcgacggactgacgttcgattacgcccggcgcgatcgcttcaacggcggagaaaccgtcgttttccagcggacctttaccatcaattggcgcgcccagggtgttaaccacgcggcccagcaggccacggcctaccggaacttccaggatacggccagtacatttcaccttcatgccttcggcgaggtcagcgtacggacccattaccaccgcacctacggagtcgcgctccaggttcagtgcgatagcgtaacggttacccggcagggagatcatctcgccctgcatacattcggcaaggccgtggatgcggataacaccgtcacttacagaaacaatagtaccttcgttatgagcttcgctcacaacattgaactgagcaatgcgctgcttgatcagttcgctgatttcggtggaattcagttgcatgctccagtccccttaagactgcaagacgtctgcaaggcgctcaagacggccgcgtacgctgccatcaatgaccatatcacccgcacggatgataatacctgccataacagacttatcgattttgcaattcagcttaactttgcgtgacagacgtttttccatcgcgctgacgatcctggcaagctgttcatcactcagttggttggcagatattacttctacctctgcgatggcctcactggccgcgcgcaggtgaatgaattgctcaagaacgtccgggagcaccttcagacgattattttccgccatcaccttaatcaggttctggccattttcgtcgagttgctcgccgcagatagcgataaacgcttctgagagcgtttccggcgccaaagcaccggagagaagctctgccatttggtcgtttttggtcacttcggcggcaaacgccagcatatcctgccagcgttcaacactgttgtgttcgacggcaaagtcaaaagctgctttggcgtaggggcgagctaccgttacaaattcagacatcagcccctccctccttacagttcagcgacaagtttatccacgatgtcgctgttagcagcttcatccacggaacgttcgatgatcttctcggcgccagcaacagccaggatagcgacctgcttacgcagctcctcgcgtgcacgtttacgctcagcatcaatttcagcctgcgcttgtgcaacgattttggtgcgttcctgttctgcttcagctttagcttcgtccagaatctgagagcggcgcttgttcgcctgctcaatgattacctgggcttccgctttcgcttttttcagctggtcggtcgcgttggcctgtgcaaggtccaaatctttcttagcgcgttctgcagaagctaaaccgtcagaaatctctttctggcgtttttcgatggcagccattaaaggcggccatacgtatttcatgcagaaccatacgaagataacaaacgcgatggcctggccgaggattgttgcgttcatgttcacagcacaatacctctttaattaactctgtggcttaggtttctaacaacttactacgcgacggcgaacatcacgtacagacccagacctacagcgatcatcgggatagcatccaccagacccataacgataaagaactgagtacgcagcagagggatcagatccggctgacgcgctgcgccttccaggaatttacctccgaggatgccgataccgatcgcagcaccgattgccgccagacccatcatcacagcggcagccatgtacagcagatccatattcaggttttccatgacagtctccagtttgtttcagttaaaacgtagtagtgttggtaaaaaatcaatgctcttcagatgccatcgacagatagacaatcgtcagaaccatgaagatgaaggcttgcagcgtaataatcaggatgtggaaaatggcccaaggcacattcagaacccactgtgaccaccacggcaacagaccagcaatcagaatgaaaatcagctcaccggcatacatgttgccgaacagtcgcagaccgagagagaccggtttggacagcaggcttaccccttcaaggattaagttgacaggaatgaacgcccagtgattgaacggctgcatggtcagttctttaacgaacccaccaacgcctttcattttgatgctgtagaaaataatcaggatgaacacgccaagcgccatcgacagggtgatgttcacgtcggcagacggaaccacgcgcagtgctggcaggccgaaaatgtgttcgccgatataaggaagcaggtcgattggcagcaggtccatcaggttcatcaggaagacccagacgaacacggtcagcgccagcggcgcgataaccttgctcttgccatggtacatgtctttgacgctgccatggacgaagccgatgatcatttcgatgaaggtttggaatttccctggtacgccgctggtcgctttcttagcaacgctacggaacatggcaaggaacagcagaccgagaaccaccgagaagaacatggagtcaatgttgagcgtccagaaggtggctgtgtggttgtgcggatccaccagcgagaatgtacgcaggtccaactgaaggttgttcagatggtgtcctatgtaatcctgcggcgtcatattttctgaagccatgatgcctttaccctttgttgttaattacagctggcgccagaacttgtaccaccagcaccaaaacccacgtcacgatcagtggcaaaaataccacttttaaaacggccagcgccaccgccagaagggcgaaggtcagcaacaccttgaaggcttcaccgaaggcgaaggtccaggccacacggccttttgctggtgtatgcgcctgatgacgccaggcaaaaattataaacatcagatttggcaagaccactgccaaaccgccgcatacagcggaaatgccccagaaggggtctttgaggctgaacagcagtccacttgccattactgccagtaactgaataaacagaagcttgcgagcaacgtttcgactcaagagcgacactgacatcacgtttttactcctgctccctttgaggtatgtcgcgtgtcgtataaaacgtcctttaagacgaagagtcaagcatcaaaaagcggacaaattatacggtgacgccccgtgatttcaaacaataagtagcaaaatagtgaataaatgtttaattattttccaacggacaactttccgtgcatttcagcgttctgtgagcggtcatacaaaactgcaaataacgagggaacacggcaattaaagcgtgcatcagatcacataataaacatttcaagcgccctttaatgaatcaaggacataaaacactatttttcatgcttttgatattcaagataaaaagtgaggacattatctaaaacaacctcacatacaataaaaaccttttattgacatttataataaaaatttaacatcactatgctgttcatcattgtcgatttttagcaccctgatattttcaaagttgactattttgtcagtgaatcacttacgctaagttaactgcaagaaaagccttagtaaaaacaaggttaaatgcagcccgttaatatcgggggacgtcctttatttttgtaacatgcgcgggccacattttttccacattttttgataaaaattaactcgattttggcttaatcaccaccaggtgccgctccccttccaaccgaggaacatgcagctcaatcacctcgacaatgtcatacccttccggcagactttccatttcttctttttgcgctaaccctttgagcgcatagaagtgaccattcgctgccggcagatgatggcaccagctcaccatatcattaagcgatgcgaaagcgcggcttatcacgccatcaaacggcggctcggccgggaaggcttccacgcggctctgcaccggggtgacgttatccagcttcagctcgtgctgcacctgacgcaggaagcgcacgcgcttgccaaggctgtccagcagggtgaaatgtgactccggacatacgatggccaacgggatcccaggcaaccccgggcccgtaccaacatcgataaagcgcgagccctgcagataaggcgccacgatgatgctgtcgagaatatgacgcaccagcatctcattcggatcgcgaacggaggtcaggttataggctttgttccacttatcgagcagtccgacgtaagccaccagctgatttttctggtgatcggtgagcgaaatacccgcttcatccagcagacgagaaagtttgttgagcacggtaagtaccttcaaaaaataatgagcccggaggcgctaacgcttaccgggctatgaatgataaaggcgaacgctgattatgcaactgggaaatcagcgcggcaggcagccgcaatcaggcgctgcggcgcagcatcccctgctttttcagccaaaccagcaaaatagagatcgccgccggggtgatcccggagatacgtgacgcctgccctatcgacgacggtttatggtcgttcagtttggcaatcacctcgttagacagcccagtgacctggcggtagtcgagggtcgctggcagcaaggtattctcattgcgctgttgtttctcaatctcatcctgctgacgcgcgatatagccctcatacttcacctggatctctacctgctcagccgcctgacgatcttccagtcccggggtgaatggcgagagttgaaccagctgttcgtaggtcatttccggacgacgcagcagatcttcgccgctagcttcacgcgacaacggcgcggtcaggtgagcgttcacttcgttggcgctctctgcctgcggattcacccaggtggatttcagacgctggcgttcacgttcgatgctttccagcttctcgttgtagcgcgcccagcgttcgtcatccaccagacccagctcgcgcccctgttcggtcagacgcaaatcggcgttgtcttcgcgcagcatcagacgatattcagcgcgggaagtaaacatgcggtacggttctttggtacccagggtgcagaggtcatctaccagcacgccgaggtaagcctgatcgcgacgcggcgcccagccctctttttccgcagagaagcgggcggcgttaagtccggccagcagcccctgagccgccgcctcttcataaccggtggtaccgttgatttggccggcgaagaacagaccctgaataaatttgctctcaagcgttggcttcagatcgcgcgggtcgaagaaatcgtactcaatagcgtagcctggacggacgatccgcgcattctccatcccctgcatcgagcggacgatttgcatttgcacatcaaagggcaggctggtggatataccgttcggataaatttcgtttgaggtcagtccttccggctcgaggaagatctgatgctggttgcgatcggcaaagcgcatgactttgtcttcgatcgacgggcaatagcgaggtccgatcccttcaatcactccggcgtacataggactgcgatcgaggttattgcggatcacatcgtgggttttctcgttagtgtgggtgatatagcacggtacctggcgcggatgctgatccgcggatcccatgaacgagaagaccggcatcgggttatcgccatgctgctgcgccagcacgctgaaatcgatggtgcgcgcgtcaatacgcggcggagtaccggttttcagacgacttacgcgcagaggcaattcacgcagacgacgagacagcgggatagacggcggatcgccggcgcggccgccgctgtagttgtccagaccaatatggattttgccgtcaaggaaggtcccgacggtcagcactaccgctttagcgcggaatttgaggcccatctgggtgacggcgcccacgacgcgatcgttttcgacaatcagatcttcaaccgcctgctggaagatcatcaggttcggctggttctccagtgcggtacgtactgcctgacgataaagcacgcggtcagcctgagcgcgggtggcgcgcactgccggtcctttgctggcgtttagtatcctaaactgaatgcccgcctgatcgatcgctttggccatcaaaccgccgagcgcatccacttcttttaccaggtgtcctttcccaatgccgccaatcgccgggttgcaactcatttgccccagcgtgtcgatattgtgtgtcaaaagcagggtttgttgacccatacgcgctgcggccattgcggcctcagtgcctgcatgacccccgccaatgataatgacgtcaaaaggatcctgataaaacatggtggtctgcctcgcataaagcggtatgaaaatggattgaagcccgggccgtggattctactcaactttcgtctttcgagaaagactccgggatcctgagtattaaaaagaagatctttatatagagatctgttctattgtgatctcttattaggatcgactctctttgtggataagtcggatccgcgaagtaagatcaaaagcttaagaaggatcactatctgtgaatgatcggtgatcctggtccgtataagctgggatcagaatgaagggttatgcacagctcaaaaaccatactacggttattctttggataactaccggttgatccaagcttttaagcatggttatccacagaagatcggacgatctttacaattctcagagcaaatttttccaggatcccagccagatttccgctggatcctccggaatttcgtgttcaaggacgttgatcttcagcgtctcaccgatctgttttgccccgcaggccttcagcgccgcttctaatttatcgatcgcgccgcaaaaggtgtcgtattcgcggctgccgatccctatagcgccaaagcgcacggcggaaagatcggcctgcttctcctgcagcgcgtcatagaagggaaccaggttgtcgggaatgtcgccggcgccatgggtggaagagataattaaccagatcccttgcgcctgcagatcgtccaccagcggaccgtgctggatttcagtgctatagccggcttcttccagcttttccgccagatgctctgctacatattccgcactgcccagggtgctgccgctgataagtgtaatgtctgccatagatcgccgatcgcccgctcaactgttcagagtggcgtattgtacgctgtgagcgagctgggatctacctgtggaaaaatgtgggattaaaaaaagcgatcagggcttgatggtgcgcatgatcgggttctgcagcacgatcagagtttcagtggactgaatttcatcgattgtttggatcttgttgataagtacctgctgcagagcatcgatggatttacacatcaccttaataaagatgctgtagtggccggtggtgtagtaagcctcggtgacctcctccagactttccaggcgggcgagggcggagggatagtctttggcgctttttaaaataatgccgatgaagcaaccgacgtcgtagcccagctgcttggggctgacgtcaatgcgcgcgccggtaatgatacccgcctgcttcatcttttcgacgcgcacgtgaatggtgcccgggctgacgctgaactgtttggccagttcggcataggcggtacgggcgttggccatcagcgcatcaagaatgccgcggtccagattgtcgatctgataattttccatatctttttcttatgaagtttgagggttcttactattttagcgccatattttaatgaattaaaagttgatgcgcctttttattgattgattattgtattgccgccctgttttgttgcttaatcaatggcaacaggacgcaggagtcataaaaatgaaaaccgcatatatcgcaaaacaacgccagatcagtttcgttaaatcccacttttcccgtcagctggaagagaagcttggcctgattgaagtccaggcgccaatcttaagccgcgtgggcgatgggacgcaggataacttgtccggctgcgagaaagcggttcaggtaaaagtgaaaacactgcccgacgcccagttcgaagtggttcattcgctggcgaagtggaagcgtcaaaccctgggacaacacgacttcagcgcgggcgaagggctgtacacgcacatgaaagcccttcgccccgatgaagaccgtctgacgcctatccattccgtctatgttgaccagtgggactgggagcgcgtgatgggggatgaagagcgtcacgtcggcaccctgaaggcaaccgtcgaggcgatctacgccgggatcaaagccaccgagctggcggtcagccaggagtttggcctgacgccgttcctgccggaacagatccattttgttcacagccaggagctgctgagccgctatccggagcttgatgccaaaggtcgtgagcgggctattgccaaagagctgggcgccgtcttcttaattggtatcggcggcaaactagctgatggcaagcgccacgacgtgcgtgcgccggattatgatgactggagtactgaggtttctgaaggttttgccggcctgaacggcgatatcctggtgtggaacccggtgctggaggatgcgttcgagatctcctcgatggggatccgcgttgacgccgaggcgctaaagcgccagctggcgctgaccggcgatgaagatcgcctgaaactggagtggcaccaggcgctgctgcgcggcgagatgccgcagactatcggcggcggcattggccagtctcgtttgacgatgctgttgctgcagcttgaccatatcggtcaggtgcagtgcggcgtatggccggcgcaggttcgcgaaagcgtttccgcgctgctgtaacgattagcgccgccagcgtcgcagcaggcggctacgcagcccggtgtcaaagcgccagatatgatcgaagatgcgcatgatgccgggtttgccgtgaaccgacatcgccaccgcgtgaaaacggtgctgatgcttacgctgtaactcccccacctgagcaatcacctcatccggcaaccgttgggcaataaagtcggagatcaccacggcatccgcatccacccactgcgggttttgcaaacgttcaataatggcgcgaaaacagctggccagatcggtgccgccgcgaaaacgctggctcaggaaacggatcgcctgctccagtccgctctcgctggtcaactcgtaatgcactacttcgctggaaaacagcataatgaagcagcgacggttatcggccagcgcgatgcgcatcagggccagacaaaaggccttagcgcactgttcgttaaaaccgcccatcgatcctgacgtatcgacgcagacaatgaacggcccgcgcggttgctcatcaaaatcctgccgcgttaccgggcgttcggtaattttctcgcgccaggcatcgccgtgtagccggtaggtgagcagctgtttctccaccagcttgcgataaaattcaaactccagctccgtgatgccaagcgtcgccagctccggcggcagcaggcgtagaatgtcgtcgctctgctggaggccgtcgacctgttcaggcaccgttgccggctcgcgtaccaggctgcggaaggtttccatcggcgcatctttcttcggcacggatttcgcttcccttgaacgccccagctgttccgccagctgcagcagctccggttgctggttaagaaaatcgccatagcgcacgatcagctggtagtcgcctcgtttgagttcgccggcgctcatatcccacaggcgtccggcggcggtatcattttccgccagcaccggatcgagctgaccgctgagcgtcattcgttcctggacctcactgagcaactggtcgcgctcctcgtccagcagctgctggttaaggctggtggcttgcaccaccaggctcaggcgccagcgctgtaaaaacagcgtatgcagcgccggggtaaaggtggcattgtcatccaccagcttctgcgcctgggcggcaaaaggggactggagctggtgcagtttgccgagaatttgcgggagctggacgataaactgcgaggtagagagcagctgagcctgctgataggtttgcacttcggcgtccagatccggcgggatgttaacttcttttaagcgggcgcgaacggcttcccgccagcgcggaatatccgccgcgatgatgtttttcaggcggggaaatttttcaaagaacaccgccagttgaggagaggccaacagcgccagcagcatctcctcgatcattccctcttcgctgactgccagcatgacattcagcatatcgagcgtcatggctgcttcgcctgtttaatctgcgcgccgacgtcctgcaggctggcttcgattcttcccagccattcgaccgggataaacaggcacttttgctgctcgctgaagcggttgtgttgctggtgccactcatcatccagcgcttccagctgctggcgaatttccgccggcatattctcctgcgctgcgctgccgggcagcgcgaggcgtgagccctgcaggctcacatcgcggacgaccagatgctggctggtgtcgacatccatattgagtagttgagcaaagccgatcccgttgagcttaccgcggatctcgccgcccttttccagccagttggctaacgcctcgcgttcaaaagtaatgtggatcacttccatatcgtgaagtttgagcggctgctgcagcagcagcgtcagggtggtcccctggatctccgccggcagttcatagtgcggtttgcggctaaacatcccgccaaggcgggtgaccttcagcgccgttttgtcgctttgctgttgttggatctgaatgcgtcgctgcacaatcgcccccaaccgcgtcagcatcgcctgctgttgccaggcgtgacaggtcatgagcgtttccagctgctgcgacatcaggttcatactttcgacgttgtgccacagacaatctttcagcaggattaggtcaatcggcgcgatgctgtcgcggccgctgaagaaggcgctggcctgcagcaggcgaatagcctttttccagcggcgatccgagacgtagggggcatttggcagggcgtccagctgctggcggagctggaatatcagctcaaacaccgcgtccggcagtttaatattgccgatctgctgctgccattgggtaaattcctcgtcgctcacctgcagcgcgctgggcactggattgctgttttcatcctgctggctgaccagcatcgaacggaaattacctttatcctgcactttatcaagccatagacggatcagcattcggtcatacagcgcttccaggctgctgtcggcttccgggagttcgttcgacgcggccaccagcaggcgcattgggattttctcttcatgcgcgccattgcggaagtgacgttcgttaatcgccgtcagtagggtgttgaggatagccggacctgctttccatatttcatcgagaaacacgatttccgcttccggcaggtagccggcggttaaacgttcgtaacggccttcatctttcagcgcctgaatggacagtggcccaaaaacctcttccggggtagagaagcgggtcatcagatattcaaaagcgcgcgcctgctggaaggcgaatttgaggcggcgggcaatcaggcttttggcgatccccggtggaccaagcaaaaaaacgctctcgccgctgagcgccgccagcaggcagaggcgtatcgcgtggctgcgttcaaagagtcctttttcgagtgccgcgctgagccgggaaattctttcagccagtaaatgtgtttgagccataattgagttgcgtgctttgtcatgtatcgttattgggacgagtatagatgttagagccggggcggtaatagcctgaagaatcgatttattttttttgagccaggttaatatggtgtctgttaggggtacgatttcacaaataatcgtgcatactgtgcgctttttgtgggccaagggactaggcacacatttgttttataaacgaaaagactagtctatgagcactgataataaacaatcgttgccggcgttaacgctggcggccatcggcgtggtgtacggcgatatcggtaccagtccactgtataccctgcgcgaatgcctgtcaggtcagtttggctttggcgtagagcgcgatgccgtttttggctttttgtcgctgattttctggctgttaatctttaccgtatcgattaaatacatcaccttcgtgatgcgggcggataacgccggggaaggcgggatcttaacgctgatgtcgctggccggacgtaatacttcggccagaatgacctccgtgctggtgatcctcggccttatcggcggcagtttcttctatggcgaagtggtgattaccccggcgatttcggtaatgtcggcgatagaggggttagaaattatcgccccgcagctcgatacctggattgtccctatctccattatcgtgctcaccctgctgtttgtgatccagaagcacgggactggcatggtcggcaagctgtttgcgccgattatgctgatctggttcctgttgctggcggtgctgggcgcgcgaagcatttacgctaatccggaagttctgcaggcgctgaacccctactgggctgtgcacttcttcctgcaatacaagaccgtttcctttattgcgcttggcgcggtggtgctgtcgattaccggggtggaagcgctgtacgccgatatgggccacttcggcaaactgccgatccgcgtcgcctggttctccgtcgtgctgccctcgttggtgctgaactattttggccagggcgcgctgctgctgaagcacccggaagcgattaaaaacccgttcttcctgctggcgcctgagtgggcgctgatcccgatgctgattatcgccacgctggcgacggttatcgcctcccaggcagtgatttccggggtcttctccctgacccgtcaggcagtgcgtctgggctatctgtcgccgatgcgcattatccatacctcggaaatggagtccgggcagatttacattccgttcattaactggctgctgtacgtttctgtggtcatcgttatcgtcagctttgagcattcgtctaacctggcggcggcgtatggtatcgccgtaacgggcaccatggtgctgacctccattctgtcggcgaccgtggcgcgcaaaaactggcactggaacaagctgtttgtcggtctgatgctggtggccttcctgtgcattgatattccgctgttctcggcgaacctcgataagattgtctccggcggctggctaccgttgtccctggggatggtgatgtttacggtgatgacgacctggaagagcgagcgtttccgcctgctgcgccggatgcacgagcatggcaactcgctggaagcgatgatctcttcgctggagaagtcaccgccagtgcgtgtgccgggtactgcggtgtatatgtcccgcgccctgaacgtgatcccgtttgccctgctgcataacctgaagcacaacaaggtgctgcatgagcgagtgatcctcctgaccctgcgtaccgaagatgcgccttacgtgcataacgttcgccgggtgcagattgagcagctgtcaccgtccttctggcgggtggtggccagctacggctggcgggaaacgcctaacgttgaagaggtgttccaccgctgtggcctggaaggactcagctgccggatgatggagacctcgttctttatgtcgcatgagtcgctgattatcggcaaacggccatggtatcttcgcctgcgcggcaagctttatctgctgctgcagcgtaacgccctgcgggcgccggatcagtttgagatcccgccaaaccgggttatcgagctcggtacccaggtcgaaatctgatgtcaaaaaagcccttccattgcgaagggctttttgtttctcactccggttgttatgtcctgtcgctgcctcgcgaaacgtttcgatggcgatcacatttctctcttctggtgatggttttctgctcacacattgataataattattttagcgaaacgtttcgctagtggagcaaaagagaaaaaatgaaaaaaggcaccgtacttaacgctgatatttccgcggtcatttcccgcctgggccacaccgatacgctggtggtctgcgatgccggattaccggttccccgcagcagcacgcgcattgatatggcgctgactcagggcgtaccttcatttatgcaggtgctggaagtggtgacgacggaaatgcaggttgaagcggctgtcatcgcggaagagattaaaacccataatccgcaactccacgcgacgttgctcactcacctcgagcagctgcagcagcaccagggaaataccattgaaattcgttacaccagccatgagctgttcaaaaaacaaaccgcagacagtcaggcggtaattcgcagcggggagtgttccccgtttgcgaatatcattctctgtgccggcgtcacgttctgaggtcgccgtcatggaagccttattgcaactgaaagggatcgacaaagcgttccctggcgtcaaggcgctctccggcgcggcgctgaatgtctatgccggccgggtgatggcgctggtaggggaaaatggcgccggcaagtccactatgatgaaggtgttgaccgggatctacacccgtgatgccggctctttgctgtggttaggcaaagagacgacctttaacggcccaaaatcctcccaggaagccgggatcggcattatccatcaggaactgaacctgatccctcagttgacgatcgccgagaacatcttccttggccgcgagttcgttaaccgttttggcaaaatcgactggaagcagatgtatgccgaagccgacaagctgttggcaaagctgaatctccgctttaccagccagaaactggtgggcgatctatcgattggcgatcagcaaatggtggagatcgccaaagtgctgagcttcgaatcgaaagtcatcattatggatgaaccgaccgatgcgctgaccgataccgaaaccgaatcgctgttccgcgtcatccgcgaactgaagtcgcaggggcgcggtatcgtctatatctcccaccgtatgaaagagatcttcgagatttgcgacgacgtgacggtctttcgtgacgggcagtttatcgccgagcgcgaggtctcgtcgctggatgaggaccgacttatcgagatgatggtcggccgtaagctggaagaccaatatccacacctcgataaggcgcccggcgcggtgcgcctgaaggtcgacaacctctgcggcccgggggtggataacgtgacctttaccctgcgccagggggagatcctcggcgttgccgggctgatgggcgccgggcggaccgaactgatgaaagtgctgtacggcgcgctgccgcgcagcagcggttccgtgacgctcgatggccgcgaagtggtgacccgttcgccgcaggatggtctggcgaacggcattgtctatatctccgaagaccgtaagcgcgatggtctggttctcgggatgtcggtaaaagaaaacatgtccctgacggcgttgcgctatttcagccgggcgggcggtagtcttaagcataaagatgaacagcaggcggtgagtgatttcatccgcctgtttaacgtgaagacgccttcaatggagcaggcgatcggcctgctctccggcggcaaccagcaaaaggtcgccatcgcccgcgggctgatgacccggccgaaggtgctgatcctcgatgaaccgacccgcggcgtcgacgtcggggcgaagaaagagatctaccagctcatcaaccagttcaaagccgacggcctgagcatcattctggtctcctccgagatgccggaagtgttgggcatgagcgatcgcatcatagtgatgcatgaagggcatctcggcggtgaattcacacgcgagcaggccacccaggaagtattgatggctgccgctgtgggcaagcttaaccgtgtgaatcaggagtaagaaagatgacaacccaggctgtttctggtcgccgctatttcacaaaagcgtggctgatggagcaaaaatcgctgattgccctgctggtgctgatcgcggtggtatcgaccatgagccccaacttttttaccgtcaataacctgttcaatattctgcagcaaacctccgttaacgccattatggcggtagggatgacgctggtcatactgacctcggggatcgatctgtccgtcggctccctgctggcgctcaccggtgcggtggcagcgtcgatcgttggcattgaggttaatgcgctggtggcggtcgcggctgccctcgcattaggtgcggcgatcggcgcagtcaccggggtgattgtagcgagaggccgcgtgcaggccttcatcgccaccctggtgatgatgctgctgctgcgcggcgtaaccatggtgtacaccaacggcagcccgatcaataccggctttagcgataatgccgatctgttcggctggtttggcatcgggcgtccgctggggatcccgacgccggtatggatcatggcgattgtcttcctggcggcctggtacatgctgcaccatactcgcctgggccgttatatttatgccctgggcggtaatgaagcggcgacgcgtctgtccgggattagcgtcaataaagttaaaattatcgtttacgccttgtgcggaatgctggcttcgctggccgggatcatcgaagtggcgcgtctctcctccgcgcagccgacagcggggacgggctatgagctggacgccattgcggcggtggtgctcggcggcaccagcctcgctggtggcaaaggacgcattgtcggcacgctgattggtgcgctgatccttggcttcctgaataatggtcttaatcttttaggcgtttcttcctattaccagatgatcgttaaagcggtggtgattttgctggcggtactggtagataacaaaaagcagtaactgagaactctacaggacatcttaactatgaatatgaaaaaactggcgaccctggtctctgctgttgcgctaagtgcgaccgttagcgcgaacgcgatggccaaagacaccatcgctctggttatctctaccctcaacaacccgttcttcgtgtcgctgaaagacggcgcgcaaaaagaagctgacaagctgggctacaacctggtggtgctggattcccagaacaacccggcgaaagagctggcgaacgtccaggatttaacggtgcgcggcaccaagctgctgctgatcaaccccaccgactctgatgccgttggcaacgccgtgaagatggcgaaccaggcgaaaatcccggtcatcactctcgaccgtcaggcgacaaaaggcgatgttgtgagccatatcgcctctgacaacgtgcagggtgggaaaatggctggcgattacatcgcgaaaaaagtgggtgaaagtgcaaaagtcattgagctgcagggcattgccggaacttctgcggcgcgcgagcgtggcgaaggctttaaacaggccgtggcggcgcacaaattcaacgtcctggccagccagccggccgatttcgaccgcaccaaaggcctgaacgtgatgcagaacctgctgaccgcacatcctgacgtccaggcagtgttcgcgcaaaatgatgaaatggcgctgggcgccctgcgcgcgctgcagaccgcaggcaagtccgatgtgatggtggttggatttgacggcactccggatggcgaaaaagcagtaaacagtggcaaactggcggcgaccgtcgcacagttgccggagcagatcggcgcgaaaggcgttgagactgctgataaggtactgaagggcgaaaaagtggaagctaactacccggttgagctgaagctggtcgttaagcagtaatatgcgattcggactggcaacggtccgagggacaatataaaaaaagaaaagcagggcatgcgccaccggatcccggtggcgcgctttcccgggaacagaaatgatgaaaactgcaggcaaacttgtcgtccttggcagtatcaatgccgatcacattcttaaccttgacgctttcccgacgccgggcgaaaccgtcaccggccaccattatcaggtggcgttcggtggaaaaggggccaaccaggcggtggccgccgggcgcagcggagcggatatcgcgtttatcgcctgcaccggcgatgacgatatcggtgaacgcatccgtcgtcagctggcgagcgataaaatcgacgtggcgcccgtgcgcgcggttgccagggaagcgaccggggtggcgttaattttcgttaacgccgaaggtgagaatgtcatcggtattcatgccggcgccaatgcggcgctttccgtctcccaggttgaggcggaaaaagagcgtatcgccagcgcacaggcgttgttgatgcagctggagtcgccgctggagagcgtcatagcggcggcgaaaatcgcccatcaccatcacaccaccgtggtgctgaaccccgcgccagcgcgtgaactaccggatgaactgctggcgctggtggatattattacccctaacgaaaccgaagcggaaaagctgaccggtattcgcgttgagagtgacgaagatgcggcaaaagccgccaacgtgctgcatgccaaaggcattggtacggtgatgatcaccctcggcagccgcggcgtctggctcagtgccgaaggcgaaagccgccggatcccagggtttcgcgtacaggccattgatactatcgcggccggtgatacctttaacggcgcgctggtgaccgcgctgctggaagggaccgccctgccggaggcgattcgctttgcgcatgccgcagcggcgatcgccgtaacccgcaaaggcgctcagccgtccgtgccttggcgcacagagatcgatgaatttttagcgcaacaggggtaatgcttggctacgatgaaagatgtggcccgcatcgcgggcgtttccacatcgacggtgtcacacgtcatcaataaggaccgctttgtcagcgaggcgattaccgccaaagttgacgctgcgatcaaaagcctcaactacgccccctctgcgctggcgcgtagcctcaagctcaatcaaacccgtaccatcggcatgctgatcaccgccagtaccaatccgttttattcggagctggtgcggggcgtggagcgtagctgctttgagcggggttatagcctcgtgctctgcaataccgaaggtgatgagcagcgaatgaatcgtaatctggagacgctaatgcaaaaacgcgtcgatggattactcctgctgtgcacggagactcatcagccctccccggaaatcatgcagcgctatccgtcggtaccgacggttatgatggactgggccccctttgatggcgatagcgatctgattcaggataactcgctgctcggcggcgatatggcgacccagtatctgattgaccaggggcatttacgcattgcctgtattgccggcccgctggataaaaccccggcgcgcctgcgtcttgaaggctatcatgccgcgatggcgcgctgcggcctgccggttgccgaaggatatgtggtgaccagtgattttgagtttggcggcgggtttagcgcgatgcagcagctgctggcgttgccgcagcgtccgcaggcggtgtttgtcggtaacgatgcgatggcggttggcgcttatcaggcgttataccaggccgggctgcagattccgcaggatatggcgctggtgggctacgatgatattgagctggcacgttatatgacgccgccattgaccaccattcaccagccaaaggatgagctgggggaactggccatcgacgtactgatccatcgcatggccgatccgcagcaaatacagcagcgcgttcagttaacgccggagctggtggttcgcggttccgcttagcgtttatgccgctcgctaatcaggttgcggccatccttcgctcttaacagcataaacatcagcgccgatataatggttatcacgcccatggttataaaggtgtagtgaaactgctgtaccgtgcttgcattatcaaaaccttcatagaagcgtagcaccgcagcgctgatggccaccccgagactaattgaaagctgctgggtgacggccagcaggctgttgccgctgctggcattatcatcggtcagatcggccagggtaatggtattcatggcggtaaactgcgtggacatcgccatccccagcacgaacagcggcagaagaagcatccacagcggcatctctggcgactgcagcgagaactgggcgatcataaggccaataaacacggtgatccccaccagggtcttacgatagccaaaccagcgcagcacctgggtaacggtggatttcgcaataatcgagccgatagcggtgggggcgatcatacagccggcgataatggccggatagccgaaaccaacctgtagcatcagcggcatcagaaacggtacgcagccggtacccaaccgcgtggcgaggttgccggcaatgccgaccgagaacgtatgggtcttaaataaagagagcgagataagcggcgtcggatggcgacgcgcgtgacgcacataggccacgagcagtaacagactgacggcaatcacggccagcgcctgccatgtcgccacgattttttccccaaacagttcaataccgctggaaaataacaccagacttaagccaaataacagaaaaccgcctatatcgaagcgtcggcgcggcgttgtgaaatttggcatgtatttacgggcgtacagaatgccaattacgccgatcggaatgtttatcaggaaaatccaatgccagctggcccaggtcacaaataccccgccgagtaccgggcccagaatcggccccaccaatcccggcatggtgacaaagttcaggaccggcaacagttcgctgcgggggtaggcacgcagcagggccagcctcgccaccggcatcatcatcgccccaccgatcccctgaattacgcgaaaaatgaccagttccgttaaggaactggagagggcgcaggcgagggaaccgagggtgaacaggctaacggcgatgataaagacccggcgcgtgccgaagcgatcggccagccagccgctgaccgggatcagcatcgccaccgtcagcgtatagctgataatggccgactgcatcgctaagggagaacgattaagactgtgggcgatagccgggagggcggtgttaagaatggtggcatccagcgcctgcataaagaaggccatcgccgcgatccacggcaggccagccatgctgcgccctttttttccgctcatgccaaatccttgttattgatttacgtggtgtggggcgttcaacaatgcctggcaggcgagcaacgcccccggcgcatcactgttaagaatggcatcgacaatcgcctggtggagatcgagcttcaccacttcattttgcgtaatcgacgtgaagtaggtgtggtagaccgaatgaaacagcgaggcgaaagagctgaggaaaggattaccgctcatttcatagatatgctcatgccaggccatatcgacttctatccagcgttcgcgctgaaaatggcgtttcagagcaatcatctcttccattaatgtattgagctgcgctttttgcccggcggtgccgttggcggcggcgagaaagcaggcctgtggctccaggctgctgcgcatgacgagaaagtggcttaccacctcttcgaagttatcttctgttagccaccaggagagcagttccttatcaaggaaattccagctgctgcgcggcatcacccgggtgccaatgcgagggcggggcagcagcatgccttttgcagtaagcgtcttcaccgcttcgcggacggcggtacggcttacgccgaactgctcccccaactccatttcgccgggaagaatgctttccggctgatattcgccagtcagtattttttgggcgagcttttcggccagtacccaggagatgttcttttgtgccgccagttgctgtgcgcttaaagacataaatgccgttcctttctttcctctactctaacagtatgccaccaggcgccccgtttcgtcggttaaaacggcaaaacggcggttttttgcgacattcctcgccgcattgttgaaaaaagagacggttgaaaactttttttgcatttccccttgtcacctcagaattactccctataatgcgcctccactgacacggaacaacggcaaacaagccgccgggtcagcggggttccggtgaggacctcgcagagaaaagcaaaaataaatgcttgactctgcagcgggaaagcgtaatatgcacaccccgcgccgcagcgaaaacgaagcggcactgctctttaacaatttatcagacaatctgtgtgggcactcaaagtgacatggattcttaacgtcctcggacgaaaaatgaataccaagtctcaagagtgaacacgtaattcattacgaagtttaattctttgagcatcaaacttaaattgaagagtttgatcatggctcagattgaacgctggcggcaggcctaacacatgcaagtcgagcggtagcacagagagcttgctctcgggtgacgagcggcggacgggtgagtaatgtctgggaaactgcctgatggagggggataactactggaaacggtagctaataccgcataacgtcgcaagaccaaagtgggggaccttcgggcctcatgccatcagatgtgcccagatgggattagctagtaggtggggtaacggctcacctaggcgacgatccctagctggtctgagaggatgaccagccacactggaactgagacacggtccagactcctacgggaggcagcagtggggaatattgcacaatgggcgcaagcctgatgcagccatgccgcgtgtgtgaagaaggccttcgggttgtaaagcactttcagcggggaggaaggcggtgaggttaataacctcatcgattgacgttacccgcagaagaagcaccggctaactccgtgccagcagccgcggtaatacggagggtgcaagcgttaatcggaattactgggcgtaaagcgcacgcaggcggtctgtcaagtcggatgtgaaatccccgggctcaacctgggaactgcattcgaaactggcaggctagagtcttgtagaggggggtagaattccaggtgtagcggtgaaatgcgtagagatctggaggaataccggtggcgaaggcggccccctggacaaagactgacgctcaggtgcgaaagcgtggggagcaaacaggattagataccctggtagtccacgccgtaaacgatgtcgatttggaggttgtgcccttgaggcgtggcttccggagctaacgcgttaaatcgaccgcctggggagtacggccgcaaggttaaaactcaaatgaattgacgggggcccgcacaagcggtggagcatgtggtttaattcgatgcaacgcgaagaaccttacctggtcttgacatccacagaactttccagagatggattggtgccttcgggaactgtgagacaggtgctgcatggctgtcgtcagctcgtgttgtgaaatgttgggttaagtcccgcaacgagcgcaacccttatcctttgttgccagcggttaggccgggaactcaaaggagactgccagtgataaactggaggaaggtggggatgacgtcaagtcatcatggcccttacgaccagggctacacacgtgctacaatggcatatacaaagagaagcgacctcgcgagagcaagcggacctcataaagtatgtcgtagtccggattggagtctgcaactcgactccatgaagtcggaatcgctagtaatcgtagatcagaatgctacggtgaatacgttcccgggccttgtacacaccgcccgtcacaccatgggagtgggttgcaaaagaagtaggtagcttaaccttcgggagggcgcttaccactttgtgattcatgactggggtgaagtcgtaacaaggtaaccgtaggggaacctgcggttggatcacctccttaccttaaagaacctgcctttgtagtgctcacacagattgtctgatgaacgtaaagaagcaaggcgtcttgcgattgagacttcagtgtccccttcgtctagaggcccaggacaccgccctttcacggcggtaacaggggttcgaatcccctaggggacgccacttgctggttcgtgagtgaaagacgcgtgccgatgtatctcaaaactcatcttcgggtgatgtttgagatatttgctctttaaaaatctggatcaagctgaaaattgaaacgacacacagttaatgtgtgttcgagtctctcaaattttcgcaatcagaagtgaaacatcttcgggttgtgaggttaagcgactaagcgtacacggtggatgccctggcagtcagaggcgatgaaggacgtgctaatctgcgaaaagcgtcggtaaggtgatatgaaccgttatagccggcgatgtccgaatggggaaacccagtgcaattcgttgcactatcgttaactgaatacataggttaacgaggcgaaccgggggaactgaaacatctaagtaccccgaggaaaagaaatcaaccgagattcccccagtagcggcgagcgaacggggagcagcccagagtctgaatcagcttgtgtgttagtggaacggtctggaaagtccgacggtacagggtgatagtcccgtacaccaaaatgcacaggttgtgaactcgaagagtagggcgggacacgtggtatcctgtctgaatatggggggaccatcctccaaggctaaatactcctgactgaccgatagtgaaccagtaccgtgagggaaaggcgaaaagaaccccggcgaggggagtgaaaaagaacctgaaaccgtgtacgtacaagcagtgggagcaccttcgggtgtgactgcgtaccttttgtataatgggtcagcgacttatattctgtagcaaggttaaccgtataggggagccgcagggaaaccgagtcttaactgggcgttaagttgcagggtatagacccgaaacccggtgatctagccatgggcaggttgaaggttgggtaacactaactggaggaccgaaccgactaatgttgaaaaattagcggatgacttgtggctgggggtgaaaggccaatcaaaccgggagatagctggttctccccgaaagctatttaggtagcgcctcgtgaactcatcttcgggggtagagcactgtttcggctagggggtcatcccgacttaccaacccgatgcaaactacgaataccgaagaatgttatcacgggagacacacggcgggtgctaacgtccgtcgtgaagagggaaacaacccagaccgccagctaaggtcccaaagtcatggttaagtgggaaacgatgtgggaaggcacagacagccaggatgttggcttagaagcagccatcatttaaagaaagcgtaatagctcactggtcgagtcggcctgcgcggaagatgtaacggggctaaaccatgcaccgaagctgcggcagcgacactatgtgttgttgggtaggggagcgttctgtaagcctgcgaaggtgacctgtgagggttgctggaggtatcagaagtgcgaatgctgacataagtaacgataaagcgggtgaaaagcccgctcgccggaagaccaagggttcctgtccaacgttaatcggggcagggtgagtcgacccctaaggcgaggccgaaaggcgtagtcgatgggaaacaggttaatattcctgtacttggtgttactgcgaaggggggacggagaaggctatgttagccgggcgacggttgtcccggtttaagcatgtaggctgattgtccaggcaaatccggataatcaaggctgaggtgtgatgacgaggcactacggtgctgaagtaacaaatgccctgcttccaggaaaagcctctaagcatcaggtaacattaaatcgtaccccaaaccgacacaggtggtcaggtagagaataccaaggcgcttgagagaactcgggtgaaggaactaggcaaaatggtgccgtaacttcgggagaaggcacgctggtgtgtaggtgaagcccctgcgggtggagctgagaccagtcgaagataccagctggctgcaactgtttattaaaaacacagcactgtgcaaacacgaaagtggacgtatacggtgtgacgcctgcccggtgccggaaggttaattgatggggttatccgtaaggagaagctcttgatcgaagccccggtaaacggcggccgtaactataacggtcctaaggtagcgaaattccttgtcgggtaagttccgacctgcacgaatggcgtaatgatggccaggctgtctccacccgagactcagtgaaattgaactcgctgtgaagatgcagtgtacccgcggcaagacggaaagaccccgtgaacctttactatagcttgacactgaacattgagccttgatgtgtaggataggtgggaggctttgaagcgtggacgccagtctgcgtggagccaaccttgaaataccaccctttaatgtttgatgttctaacgttggccccttaccggggttgcggacagtgtctggtgggtagtttgactggggcggtctcctcccaaagcgtaacggaggagcacgaaggttagctaatcctggtcggacatcaggaggttagtgcaatggcataagctagcttgactgcgagcgtgacggcgcgagcaggtgcgaaagcaggtcatagtgatccggtggttctgaatggaagggccatcgctcaacggataaaaggtactccggggataacaggctgataccgcccaagagttcatatcgacggcggtgtttggcacctcgatgtcggctcatcacatcctggggctgaagtaggtcccaagggtatggctgttcgccatttaaagtggtacgcgagctgggtttagaacgtcgtgagacagttcggtccctatctgccgtgggcgctggagaattgaggggggctgctcctagtacgagaggaccggagtggacgcatcactggtgttcgggttgtcatgccaatggcactgcccggtagctaaatgcggaagagataagtgctgaaagcatctaagcacgaaacttgccccgagatgagttctccctgagactttaagtctcctgaaggaacgttaaagacgatgacgttgataggccgggtgtgtaagcgcagcgatgcgttgagctaaccggtactaatgaaccgtgaggcttaaccttacaacgccgaagatgttttggcgatttgagagaattttcagctctgatacagattaatcgatacgtcggtgagacgtgttgataaaacagaatttgcctggcggcactagcgcggtggtcccacctgaccccatgccgaactcagaagtgaaacgccgtagcgccgatggtagtgtggggtctccccatgtgagagtagggaactgccaggcatcaaataaagcagaaagcccggtcgaaagaccgggctttttgttttatctgttgtttgtcggtgagcgctctccagagtaggacaaatccgccgggagcggatttgaacgttgcgcagcaacggcccggagggtggcgggcaggacgcccgccataaactgccaggcatcaaacaagtgaagagcccatcctgccggatgggctttttgcgtttctgtcgtccggccagcgtgccggtatgcctccccggtggcgctgcgcttgccggggctacggatccgacacggggctacgtcccagtggccggacaaggtgcgcagcaccgcctccgggaaaatccctcctatatcaccgtcgataaatgactattgcctctctaaccaactcacaataaatgtcgcgatctgtggtacatcatttaaatccagcagcggaagtgaggtcgcgatcgatacatcgctggccacggcgatggtatgctcatcaattaccagctcttctacacgatggccgctgttttgccgaaaaagcaggatcttcggcacgggttcatgtttgaacccctccactaaaaccaggtccagtttgctggcatccattcgactgaccagccacgtgagatctaattccggcttctctggcgtctcggtcatcaatgcccaccgctgttcgctggcgacaatagtttgcgcagcgcccgccttacgcagttcatagctatctttgcccggcttatccacgtccatatcatgatgggtgtgctttatcagtcccgggcgtaatcctagagcgcaaagctcagggataagacgctttaataatgttgtttttccggtaccgctccatgcggcgatcgccagtaatgggatcatgatggctcctgcatctgctgcaaatcttcgagcgtatttacattaatgaaagcagttttcacatcgctgaaattcaccgggcgcccacccatttgtcgcataaaaaccatcaccctgcgctctccatgtgccagataagcctccagttccggaatgatttgacgatgaactaatgcaacggcaggatgatcccgttcgccgtcatgggcccaaacgactggtgcgtcccctctctgctggataaagcgctccaccaaaaaggacggaatgaacggcgtgtcgcaggggcaaaaaacaaaccatgggctcgcgacctgctgcatcacagcaagcattccggccagcggcccctgataaccctcctgtatgtctcgaaagaccggatatccgctggcacgccactgttcaagatgacgattggcgctaatgactaactcatctacctgcggggctaatgcttccgcgacgtgtcgccagagagggcgaccatttagcgcctgtaatcctttatcaatgccgcccatccgcgtggccctgccgcccgccagcacgacgccggttatcgcctcgctttgcatatgaatatcgcctctttcattgtgggattgaccctgttaacttgtccctatcaagagtaaggagcatgaccatgaaatgtaaacgtctgaatgaagtaattgaactcctccagccagcctggcaaaaagagcctgaactgaacctgatgcaatttttgcagaagctggcgaaagaggccggctatgatggcgaactgagcgatctttccgacgatattctgatctatcacctgaagatgcgcgactcttccaaagatgctgtcatcccgggtattcagaaggattatgaagaggattttaaaaccgcgctgctgcgcgcccgcggggtaataaaagagtaaaaggttgtaagcgctaccgcgtaaagtgcaatgagatgatatcctgaactattcgtacgattatcggatgtcaggatgcacgataaggcttttacttttcagacgcttcgcccggataccattatcgatgggttattcgatctgggtatgcgggtggactccggtctcaccccgctaaacagctatgagaaccgcgtttatcagttccaggacgaagagcgccatcgctatgtggtaaagttctatcgtcctgagcgctggtccgcagaacagatccttgaagaacaccagtttgcgcttcagcttgtagaagatgaagtgcccgttgctgcgccgctcttatttaatgacagcacgcttcatcagcatcagggattctactttgccgttttcccaagccttggcggtcgtcagttcgaagcggataaccttgatcagatggaatgggttggccgctacctggggcgcctgcaccagactggccgcaaacagcgctttactgcccgcccggaaattggcgtgcaggagtacctgctggaaccgcgtcaggtgtttgagcaggcgacgctgatcccctctggcctgaaggccgatttcctgaaggcgaccgataaactcattgctgccgtcatggagcaatggcacggccgcgggaacacgttgcgcctgcacggtgactgccatgccggtaatatcctctggcgcgacggaccactgtttgtcgacttagacgatgcgcgcaccggcccggcgattcaggatctgtggatgctgctcaacggcgataaggctgaacagcgtatgcagctggagactattgtcgaggcctatgaggaattcagcccctttaacagcgatgaaatcgcgctgattgaacctttacgcgctatgcgactggtttattatctggcgtggttgctcagacgctgggacgatcccgctttcccggtcaatttcccctggttaaccggggaggattactggcggggacagacgtcgacttttcttgagcaggtgaaggttctacaggaacccccgcttcagttaacgccaatgtattaatgtgatatatccaggagagagtaaatcatgaaaaaagtttggctggcgctggctggtatgattctggcttttagtgcatccgctgcccagatcaccgacggcaagcagtacatcacccttgataagcctattgctggcgagccgcaggtgctcgagttcttttcgttctactgcccgcactgctaccagtttgaagaagtgctgcatgtctctgacaatgtgcgccagaaactgccggaaggcactaaaatgaccaaataccacgttgagttcctgggtccgctgggcaaggatctgacgcaggcatgggcggtggccatcgcgctgggcgttgaagacaaaattactgcgccgatgttcgaagccgtgcagaaaaaccagactgtgcagagtgtggctgacattcgtaaagtgtttgtcgacgctggcgtgaaaggggaagactacgatgccgcatggaatagcttcgtggtgaaatctctggtcgctcagcaagagaaagcggcagccgatctgcagctgcagggcgtaccggctatgtatgttaatggtaaataccagctgaatccgcaggggatggacaccagcaatatggatgtcttcgtcgctcagtatgcggataccgtgaagcaactggtagagaagaaataaaaaaacgccggtcactgaccggcgttactttatctgttttgcaatagctaccgttctttgtcccgcatgatgtcagtcaactgacggtctttctcttcccataggccattcagccagcgctggaagctgcgcttaaagttcttatcgttaacgtaatcgccgtgcagctcttcgccaatagggaccagattgatacggaccacaatgcgcgtcaggcggccgcttaacatatcgtaaaatggtcttgtatgattatccgggtagcacagcgtgacgttcagcagtttatcgaactgcgaaccgagtacgttgagcgccatggcgataccagcggctttcggcggtaacaggttgtggtaaggagagcgcgtttcgcgctttttttcttcggtaaaacgcgagccttctacaaaattgacgatagtcgtcggatgcgcgcgaaatttttcacacgaacggcgggtggtttcgacatctttaccgcggcgctccgggtgacgaataagatagctgcgcgagtagcggcgcataaaaggcatatccagcgcccagcaggcgaggccaatgaagggtacccacgccagctgttgtttaaggaagtacttattcatcggaatatgcttgcggaacagcacgcacagcaccacgatgtctgcccagctgtggtggttgctgatcagcagataccagttctttttgttcaggccttccagaccctggacgtcccattttagccagggattgagatgcaacagcagcgccagcccttcgcaccagcagtacatcataaaattgcaaaaaacggatatagagcgccataccgctggaatggggaccagcagtttaatcagcccggcgacgatgatcggtacagagcagataatggtgactaagatggttaaggcgatactcagcggaagtgttatcgcagcgagtaatctcgacatagttagtttattcagaaagttaggctgacaaagagcgcctttaagctgcgcaagaggctgattttaccagaaaacgcggcaaatgacgggtcttaccagaacagaaaaaaacaaggatcttctatccacatggaagattaggtcatcaaattaatgccaggatcgttgatctgtttttaagtggttgataaatagtaaataatactatttattcatttattttcaggggcggataagctgacgttgtaaaactatgcacaaagttatccacaagctaagttgtcgcgcgatcgcgacgatcgttgaatcttttccgcgaattgcgggaaaaattcaggatttcatgcccgtctgtggcatcctttatccataatctgataaacaggcacggaaattatggttcagatcccagaaaaccctctcatcctcgttgacggctcctcctatctttatcgggcgtatcatgcgtttccgccgctgactaacagcgcaggggagcccaccggggctatgtacggcgtactgaatatgctgcgcagtttgatactgcagtatcaaccgactcatgccgtcgtggtctttgatgcgaaagggaaaaccttccgtgatgaattgttcgagcattacaaatctcaccgcccgccgatgccggacgatctgcgcgcgcagattgagccgttgcataagatggtgaaagcgatggggctgccgctgatggctgtcccgggcgtcgaagctgacgatgtgattggcaccctggcgcgggaagcggaaagggcaggtcgcccagtcctgatcagcaccggcgataaagacatggcccagctggtgacgccgggcatcaccctgatcaataccatgaccaacactatcctcggaccggatgaggtggttactaagtacggcgtcccgccggagctgattattgatttcctggcgctgatgggcgactcctcggataacattcccggcgtgccgggcgtgggcgaaaagaccgcccaggcgctgctgcaaggcctcggcggtcttgatacgctgtatgcggaaccggagaagatcgctgaactgagcttccgcggcgcgaaaacgatggcggcgaagctcgagcagaacaaggacgtggcttatctctcttatcagctggcgaccatcaaaaccgacgtcgagctggagctcacctgcgaagagctggaggtgcagccgccggcggcagacgatctgctggcgctgttcagacagtatgaatttaagcgctggaccaccgacgttgaggccggaaaatggctgcaggctaaggggggcaaaccggctgcgaaacctgcagtgcctgcagcagcggcagaagcggaagaagaggttgaagccgctactgcactttcagcagagcattatgtcactatccttgatgaggctacgctgctcacctggatcgataagctgaagcaggcgccgctctttgcctttgatacggaaaccgacagcctggataacatctccgccaacatggttggtctttcattcgctgttgagccaggcgtggccgcctatgtcccggtagcgcatgattatcttgatgcgccggatcagatcccgcgcgagcgcgtgctggcgctgcttaaaccgctgctggaggatgagaaggtgctcaaggtcgggcaaaatctcaaatacgatcgcggcattttggctaattacgacattgagctgcgcgggattgcgttcgataccatgctcgagtcttacattctcgacagcgtggcgggccgccacgatatggacagtctttccgaccgctggctgaaacataaaaccattaccttcgaagagatcgctggcaagggtaagaatcagctcacctttaaccagattgcgctggaagaggctggtcgctacgcggcggaagatgccgacgttacgctccagctgcatctgaagatgtggccgaagctacagcagcatgaaggcccgctgaatatcttccagcatattgaaatgccgctggtgccggtgctgtctcgcgttgagcgcaacggcgttaaaatcgaccccgccgtgctgcatgcgcactcgcaggaaattgcccagcgcctggttgagctggagcagcgagcacatgagatcgccggggaagcgtttaatctctcctccaccaaacagctgcaaacgatcctgtttgaaaaacagggtatcaagccgctgaagaagacgccgggcggtgcgccgtccacctctgaagaggtgctggaagagctggcgctcgattatccgttgccgaaagtgattctggagtatcgtgggctggcgaagctgaagtcgacctataccgataagctgccgctgatgattaaccccaaaacgggccgcgtgcatacctcctatcatcaggcggtcaccgccaccggccgtttgtcgtctaccgatccaaacctgcaaaacattccggtgcgtaacgaagaagggcgccgtattcgccaggcgtttatcgcgccggaagattacgtcattgtctcggcggactactcgcaaatcgagctgcgcattatggcgcacctgtcgcgggataaaggcctgctgaccgccttcgcggaagggaaggatattcaccgggcgacggcggctgaagtatttggcttaccgctggacagcgtcagcagcgaacagcggcgcagtgcgaaagccatcaacttcggtctgatctacggcatgagcgcctttggcctggcccgccagctgaacatcccgcgtaaagaagcgcagaagtacatggatctttatttcgaacgttatccgggcgtcctggagtatatggagcgcacccgcgcacaggcgaaggagcaagggtatgttgaaacgctggatggccgtcgactctatttgccggatatcaagtccagcaatggcgctcgtcgtgccggcgcggagcgtgcggcgattaacgccccgatgcaggggacggctgcggatattatcaagcgggcgatgattgccgttgatgaatggctgcggagcgagaaacctcgcgtgcggatgatcatgcaggttcacgatgaactggtctttgaagtgcataaggatgagctcaatgccgtatcgaaaaagatccacgaactgatggagaacagcactacgctggcggtaccgttgctggtggaagtgggcagcggcgaaaactgggatcaagcgcactaagtatacaaagcgcaacgcgattttctgtaagtaagcaacataacttatagagttttgtgaggatcatttgaatttgctatgtaaatagtgaaaaaaaactacaaaaaatgctttatccgtgagcgaaagaagagtaaagttattcgcgtagggtacagaggtaagatgttctatctttcagaccttttacttcacgtaatcggatttggctgaatattttagccgccccggtcatttatgaccggggcgttttttattgcgcgaaagaaaagttttaggctgtgaaaacaacgtagtatgaacgtccggatagggcgctacgcgccgttatccggaaaaagcgggggttactcggcgtcttcgacggcttcttgcggcgggatttcgttaaaccagctatccagcttctgtcgcagcttatcgacgccagattttttcagcgaagagaagggttcaacctggacatcgccattgaaggccagtaccgcttcacgcaccatattcacttgcgctttacgcgcgccgctggcgagcttatcggctttggtgagcagtaccagcacctgaatatcgctctctaccgcccattcgatcatctgctgatcgagatctttaagcggatgacgtatgtccatcagcaccacgagacccttcaggcatagacgtttttccaggtattcccccagcgcgcgctgccacttgatcttcatctcttcgggtacttgcgcataaccatagccgggcaggtcgacaaggcgcttgccctcagcgacttcgaacaggttaatcagctgcgtacgccccggggttttggaggtacgcgccaggttcttctgattagtcagcgtattcagcgcgctggattttcccgcgttggagcggccggcgaacgccacttcaataccggtatcggcaggaagatggcggatatctggcgcgctagtgacaaagtgcgtcagttgataattccagttggtcaagacggtcgtctccgttaaaacaggctatggcagggattatacctgaacagcagaaaaaggctgtttttaccgcacgccgtttctgtaagtaaaaaccatatggtttgtgagacattgactattctttgtataggatatacctgaggaaaataagacaaaacatacttaatgtgttgaaaattaatgaattatagaaatagagaattctgaaaatagatttttaactgccagactggttgtcgatttttgtcaacaaggtaaagtaatacacaacggcggggatgctgaaaggattaggactcaggacgaggagtcaggaagcgccaggaggcgaagaccacaggatagtcaggatgacgcgcgtcttggagacgttttacagggaaaaggaagaaacagggaccgttggacgctaagggaaagacagggtgagtcgttagcgaacagggaaagaagagcccgttaagggtggtcagtgaggaaaaaggcgacagagtaatctgtcgccttttttctttgcttgctttctgctagattccgcctcaattctatactgaatactactgtctgaagattacacatcatgaaaaaaccgacatccgccacccgtggcaaatccggccgcaagtcgcgtgaagagttaaatcaggaagctcgcgatcgcaaacggcagaagaaacatcgtggccacgcggcaggcagtcgcgcgaacggcggcgatgcggcttcagcgggtaaaaaacagcgtcaggcgcaagatccgcgcgtgggtagcaaaaaaccgatcccgctgggcgtgagcgaaagcagcgctccagcccccaagcagcataaaccaaagagcgagaaacctatgctttcaccgcaggctgagctggagttgctggagaatgatgagcgcctggacgcgctgctggaacgtctggaagagggcggcaccctgaatgctgaagagcagagctgggtggacgccaaactggatcgcattgatgagctgatgcagcagctcggcctctcttacgatgatgaagatgaagaagaggaagagcgtcaggaagatatgatgcgtctgctgaagggtggaaactaacatttgcatcccatcggattcccggtactccttataacccttctggttatatgttatctgctgtggttattcgttaaactacgacggttgtcgcggcgtcagaaatggctgcgcaaccggctcatgacccgcggtgcggtggggccgggacggcgtacccgtcggcggcaccatcggaaggagtgagcatgtctgagcagataatcgactgggatctggccctgatccagaaatataactattccgggccgcgctatacctcgtatcccaccgcgctggagttttcaccgcaatttggcgcggcggaattcgatgccgctgtggcccgttacccacagcgtcccctgtcgctgtacgtgcatatcccattttgccataagctgtgttatttctgcggctgcaataagatagtcacccgccagcagcataaggccgatcaatatctcgatgtccttgagcaggagatcatccaccgcgcgccgctgtttgccactcgccaggtgaagcaactgcactgggggggcggcacgccaacttatctcaataaggcgcaaatcagtcgcctgatggatctgttgcgcagccattttcatttcagcgcggaagccgagatctccattgaggtcgatccgcgtgaaatcgagctggatgtcctcgatcatttacgcgctgagggtttcaaccgcctgagtatgggcgtacaggacttcaataaagaggttcagcgtctggttaaccgtgagcaggacgaagcgttcatctttgatttgctcaaccatgcgcgggagattggttttacctcgaccaatatcgacctcatttatggcctgccgaagcaaacgccggagagcttcgcctttaccctgcaaaaggtcgccgagctcaatcctgaccgcctgagcgtgtttaactatgcgcatctgcccacgctctttgccgctcagcggaagattaaagatgccgatctgccctccgctgagcagaagctggagatcctgcaggaaaccatcggctcgctgacgacggcaggctatcagtttatcggcatggaccatttcgcccgtcccgatgatgaattagcggtcgcgcaacgtcacggcgtactgcatcgtaatttccagggctacaccactcagggcgataccgatctgctggggatgggcgtttcggcgatcagcatgattggcgacagctacgcccagaaccaaaaagagctcaagcagtactaccagcaggtagcagagcaagggaacgccctgtggcgcgggatcgcgttaactcgcgatgactgtctgcgtcgcgacgtgattaaggcgttgatctgtaacttccagctggatatcgcggcggtcgaggcgcagtgggacgtggattttgcgtcttatttcgccgaggatctgaagctgctggcgccgctggcgcatgacgggctggtggctgtggatgataaggtcattcaggtgacggcgaaaggccgcctgctgatccgcaacatctgtatgtgctttgatgcctacctacggcaaaaggcccgaatgcagcagttctcacgggttatttaatattttccccctctcccgcaggagagggggaacaattagctgaacagcccgaccagcgcagcgcacagcacggcagcgactgccgtttgtggcgtgtgactcgcagcggcgccgctcgatatcatactcaccagtgattcaaacatgatgctctcccctaatgccgggcacgatcatactcaactcatcggaacagtaaagtacaaaatagcagcactttgcgccgatcggctatttttcatcatgctgttgaaccctactccatacccaactcttttagcttacgcgtcagggtattacgtccccatcccagcaggcgcgcagcctcctgcttgtgcccctgagtatggcgcagggcggtcgttagcagcgtgcgctccatttcgggttgcgcttctgagagcaggttttgatgaccggatcgcaacgcccgatcggcccactgacccagcagcgtagcccagctgtcaggctgcatctgcgttgggctatcaggaatcgtggtctcaaacagttcgctcggcagatcctgcgtcagcacctcctggccggcggccatgacggtgagccagcgacaggtgttttccagctgacggacgttgcctggccacgccaggcgggtcagcgctgtctccgtttccggatgcagctgtttggcttcaacgccgagctcgcgggcggctatctgcaggaaatggcgggccaggcgtggaatatcttcccggcgctcgcgcagcggcggtaaatgcacccggatgacgttcaggcggtggaacaaatcttcacgaaatttcccctcctgcacgcgctgttccaggttctggtgggtagcggcgatgatccgcacatcgaccttcaccggcgcgtaaccgcccacgcgataaaactgaccatccgccagcacgcgcagcagacgagtctggacatcaagcggcatatcgccaatttcatccaggaacagcgtaccgccgtcagcctgttcaaagcgaccctgacggacggtattggcgccggtaaaggctcctttttcatggccgaacagctcggactcaatcaggtccttggggatcgccgccatattcagcgcgataaacggcgcttttgagcgtggactatggcgatgcagggcatgtgcgacaagttctttaccggtaccggattcgccattgatcagcacgctgatggatgagcgcgacaggcggccaataatgcgaaagacatcctgcatagctggcgcttcgccgatgatgtcggcagttgggctacttatcggcgcatttcgcggctgctgctgctcttgatagtggcttatcgcccggtcgacgagggcgacggcttcatcgatatcaaaaggtttgggcaaataatcaaacgcgccctgctgataagcgctgaccgcggcgtccagatcggaatgcgcggtcattatgatgaccggaagcattggatggcgctgcttaatctgtttgagcagcgccagaccatccattcccggcatacggatatctgacagcagtacatccggggttttggtggtgagggcatctagcacctcattgccgctttcgaacgttgtgcagctcaagccggctccggtgagcgcgcgttcaagcacccagcggatggagctatcgtcatcaacgatccaggctatccctcgttgcataaacacctctacttccgaataggcaggtataccgaaaattcggtatgacccggccagctggtgaattcaattttgccggagtgctgatcgataaggctacgggcgatagataagcccaggccggtaccgccttcgcggccgctgaccatcggatagaacagcgtatcctggagatggggcggaatacccgggccattatcttcaacgtcgatgcgggcggcgaggcgataacgcaccccgtgcagcgtcagctggaaagcggtgcgggtgcgaagaataatttcgcccccttccggccccagcgcctgcagcgcattacggacgatgttcagcaacacctgttcaatttgatccgggtcgtggggtagctctggtaggctggggtcgtaatcgcggatcaacttcacgttgtccggcaactccatggaaaccagtttaactacccgttcggcgactttgtggatgctttcggtaacgtgcatgcccggatgctgtggtccgagcaggcggtcgaccagatttcttagccggtcggcctgctcaatgatcactttggtatattccgttagcgccgggtcgggcagcgctttgctgagcagctgggccgcgccgcgcaggccgcctaacgggttttttatctcatgcgccaggccgcggacgaggtcgcgagcggcgacctgctgcgcatgctgcagctgctcctggctcaggcggcgctgattatccatcggcgccatttccagcagaataaagccttccggcagccgctgggcggtcaacgacaggatgtgcgaacggccatcgataaccaacgtcacttcgttatcggtaaacccctggcccgcctgcagactctcctgcatcagcccgatattcaacgaaaaatagctcaacagctcaggtaatggggtgccaaacagtttgcgcgagctctgcgccagcagctgctgcgccgcagggttggcaaagtgcaccgccaggtcatcatcgaccagtaaaatactgttgataagggagttaaggatctgcccagcatcgggcagtgtgcctgttgccattcgacagtctcctgaaaatgagtgcaccaatttagtgcagtatagctttttatcggtaaaaagctcgcgagatcagcgtgttggtggagaaaaaagcccatcctgagatgggctgaaagtttccacggcaacaaaatatcccgggcatctcgcgccacaacacgacataccctggatttacagcaaaattagacgctgtagtacagttcgaactcaaccggatgcggagtcatgcgtacgcggtcgttctcttccatacgcagggcgatgtaggcatcgatagcgtcattggtgaacacgccgccagcggtcaggaactcgcggtcagcatccagggcctgcagggcttcttccagagaaccggcaacctgcgggatctctttcgcttcttccggcggcaggtcatacaggtttttatccattgcttcgcccggatggattttgttcttgataccatcaaggccagccatcagcagcgccgcaaagcacaggtacgggttggcagccgggtccgggaagcgcacttcgatacgacgcgctttcggagaggtcaccaccggaatacggatagaggcagagcggttacgggcagagtaagccagcataaccggcgcttcgtaacccgggaccagacgcttgtaggagttggtggtcgggttcgccagggcgttgatggctttagcgtgtttgattacgccgccgatgtagaacagcgcctgctcagacagaccggcgtatttgtcgccggagaacaggttggtaccgtttttcgccagagacatatggcagtgcatgccggagccgttgtcgccgaacatcggtttcggcataaaggtcgcggttttaccaaagcggtgagcgacgttgtgaacaacgtatttgtaaatctgaatttcatccgcttttttggtcatggtattgaagcgggttgccacttcgttctgacctgcggttgctacttcatggtgatgggcttcaacaaccagacccatctcttccatgatcatacacatggtggaacggatgtcctgagaagagtctactggcggaaccgggaagtaaccccctttcacgcccggacggtgacctttgttaccgccttcgtatttggtggaggagttccacgcaccttcaatgtcatcgatcgcgacatgggagcccgagatagaggcgccaaaacggatgtcgtcgaacaggaagaattctggttctggcccgaacaggacggtatcagcgatgccggtggcgcgcaggtactcttcagcgcgtttcgcgatggagcgcgggtcacggtcatagccctgcagggtgcctggctcgaggatatcgcagcggatgatcagggtcggttcttcgtagaacgggtcaatgaccgcggtggacgcgtccggcatcaggaccatgtcagattcgttgatacctttccagccaccaatcgaggagccatcaaacattttgccttcttcgaagaattcggcatttacctgatgagacggaatcgtgacgtgctgttctttacctttggtatcggtgaagcgcagatcgacaaacttcacttcgtgctcgttcagcatcgtcaaaacgtgttcagcggacatacttaaactctcccggattggtcattgtcgtcgtggtaacgaaaacttcatactgcttaaaagtggcgttgttgccttaaaaaatataaagcgaaatctgtgccaacttttaaatgccctataaaacgctgtatcatgcgcaccatagtgcaaaaggactgcaccatgatggagataatgcaccaaaatagtgcttcagtgtgaacattgagcaccattttggtgcaatttttgttacggtgcccttttatcgctccgtgaaagcggtcacaaagaaactctgcaatacttgtttgcggaggatgtttgtgatcctgttcagtccttcgcttaatacgtgtacaataacgcgctatttctaatgcctgaggcaaagttgtgatcgaaaatctgcgtaatatcgccatcatcgcgcacgttgaccatggtaaaactaccctggttgacaagctgctacagcaatccggtacgttcgacgcacgtactgaagcacaagaacgtgtgatggactccaacgatttggagaaagagcgtgggattaccatcctcgcgaaaaacaccgcaatcaaatggaatgattaccgtatcaacatcgttgataccccagggcacgccgacttcggaggtgaagttgagcgtgttatgtccatggttgactctgtgctgctggtggtagatgcctttgatggcccgatgccgcaaacgcgcttcgtgaccaaaaaagcttttgcccacggtctgaagccgatcgtggtcatcaacaaagttgaccgcccgggcgcgcgtccggactgggttgtcgatcaggtgttcgacctgttcgttaacctcgatgcgaccgacgaacagctggacttcccgatcgtttacgcgtccgcgctgaacggtatcgcgggtctggatcacgaagacatggctgacgacatgaccccgctgtaccaggcgattgtcgatcgcgtgccggcgccggacgttgatcttgacggtccgctgcagatgcagatctcccagctggactacaacaactacgttggtgttatcggcatcggccgcatcaagcgcggtaaagtgaagccgaaccagcaggtcactatcatcgatagcgaaggcaaaacccgtaatggtaaagtcggtaaggtactgactcacctgggtctggagcgaattgagagcgacgtagctgaagctggcgacattatcgcgatcaccggtctgggcgagctgaacatctccgacaccatctgcgacccgcagaatgtcgaagcgctgccggccctgtccgttgatgagccgaccgtttccatgttcttcaacgtcaacacctctccgttctgcggtaaagaaggtaagttcgttacctctcgccagatcctggaccgtctgaataaagagctggtgcacaacgtggcgctgcgcgttgaagaaaccgaagacgctgatgcgttccgcgtttccggccgtggtgaactgcacctgtccgttctgattgaaaacatgcgtcgtgaaggtttcgagatggcggtttcccgtccgaaagttatcttccgcgaaatcgacggccgtaaacaagagccgttcgagaacgtgacgctggacgtcgaagagcagcaccagggttctgtcatgcaggcgctgggcgagcgtaaaggcgacctgaaaaacatgaatccggacggtaaaggccgcgtacgtctcgactacgtgatcccaagccgcggtctgatcggcttccgttcagagttcatgaccatgacctccggtaccggtctgctttactccaccttcagccactacgacgacgttcgtccgggcgaagtgggccagcgtaacaacggcgtactgatctccaacggtcagggtaaagcggtagcgttcgcgctgttcggtctgcaggatcgcggtaagctgttcctcggccacggcgctgaagtttacgaaggccagatcatcggtattcacagccgttccaacgacctgacggtaaactgcctgaccggtaagaaactgaccaacatgcgtgcgtctggtactgacgaagccacggttctggttccgccggttaagatgaccctggagcaggctctggagttcatcgatgacgacgaactggtagaagttactccgacctctatccgtatccgtaaacgtcacctgaccgagaacgaccgtaaacgcgcgatgcgcggtgcaaaagaagagtaattttttcttcttgttgttcgctaaaccccgcctctccggcggggtttctttttttcattcctgcatcacacgccaatagtcaaatccagcctttcccgctaaagttaattttccacggcgcggaaggagacaaaaatgctctatatctttgatttaggtaatgtgattgtcgacattgacttcaaccgggtattgggagcctggagcgatttaacccgcatcccgctggcgacgctgaagcagcatttcaccatgggtgaggctttccatcagcatgagcgcggcgagctcagcgatgaagactttgccgccgccatgtgccatgaaatgaatatgcccctcagctatgaacagtttgctcacggctggcaggcggtatttgtcgcgctgcgcccggaggtaattaccatcatgcataaacttcgtgcccaggggcatcgggtggtggtgctctccaataccaatcgtctgcacaccacgttctggcccgatgaatacccggaagtgcgcgcggccgccgatcgcatttatctgtcgcaggagatgggattgcgtaagcctgaagcgcaaatttatctgcgagtactggaggaagaggggttttccgccgcagatacggtcttttttgatgataacgtcgataatatagcaggggccaaccggttggggatcaccagtatcctggtgactggtaaggagaccatccctgactatttcgcgaaacagctatgctaaaaaccgttcatcaaaaattactccaccatacccggccgctgctggcgtggctaaagctgctgtggcggcgcattgatgaagaccatatgaccaccctggcggggaacctcgcctatgtgtcattactgtccctggtgccgctgattgccgtcgtgttcgcgctgtttgcggcctttcctatgttctccgaagtcagcgtgcagatccgtcattttatcttcgccaattttattccggcgaccggggatgtaatccagggatatatcgagcagttcgtggccaactccagccgcatgaccgccgtaggcgcctttggcctgatcgtcacctcgctgctgctgatgtactcgatcgacagcgcgctaaacaccatctggcgcagcacgcgcagccgccccaaagtttattcctttgccgtttactggatgatcctgaccctcggcccgctgctggcgggcgccagcctggcgatcagttcctatctgctgtcgctgcgctgggcaagcgacctggacggcgtaattgataatctgctccgcctatttccgctgatcctctcctgggcagcgttctggctgctctatagtattgtaccgactacccaggtacgtaaccgcgacgcggtgatcggggcgctggtggcggcgctgctgtttgaggcaggtaaaaaggcgtttgccctctatatcaccacctttccgtcctatcagctaatttatggcgtgatttcggtggtgccgattttgttcgtctgggtgtactggacctggtgtatcgtcttgcttggcgctgaaattactgtcactctcggtgaataccgcaaacttaaaacagaagaaacagaacaaccatgattgcattaattcaacgcgtatcccgtgcaagcgttaccgtggcggacgaggtgacgggcgaaattggcccggggcttctggtgctgctgggcgtcgagaaagacgatgatgaacaaaaggcgaatcgcctttgtgaacgcgtgctgggctaccgcatcttcagcgatgcggaagggaaaatgaacctgaatgtccagcaggcgggcggcagcgtgctggtggtttcgcaatttacgctggcggccgataccgagcgggggatgcgaccgagcttctcgaaaggcgctgcccctgaccgcgctgaggcgctgtatgagtatttcgtcgcccgctgtcgccagcaggaaatgcacacccagaccggaagatttgctgcggatatgcaggtttctttggtcaatgatggtcccgtgaccttttggttgcaggtatgacccagcttccgggcaggctgcgggtaacaaaagagagtacgactatgtatcaccttcgtgtaccgcaaacagcagaagagttagagagctactaccagttccgctgggagatgctgcgtaagccgctgcatcagcctaagggatcggaacgtgacgcctgggatgcgatggcgcatcatcagatggtagtggatgaagagggcaacctggttgccgtcggccggctatatatcaatgcggagaatgaagcctccatccgctttatggctgtgcatccctcggtgcaggataaagggctgggtacgctgatggcgatgaccctggagtccgtcgcgcgtcaggaaggggttaagcgggttacctgcagcgcgcgcgaagatgcggtggaatttttcgccaagctcggatttgtcaatcagggtgagatcaccaccccgaccaccacgccgatccgtcattttctaatgatcaaaccggtcgcgtcgctggacgatattttgcaccgcggcgactggtgcgcacagctccagcaggcgtggtatcagcatattccgctgagtgaaaaaatgggcgtacgtattcagcagtacaccgggcagaaatttattaccaccatgccggaggcggggaaccagaatccgcaccatacgctgttcgccggcagcctgttttcgctcgctaccttaaccggatgggggcttatctggctgatgctgcgcgagcggcacctgggaggcaccattattctggcggatgcgcatatccgctacagccagcctattagcggccgccccagcgccatcgccgacctcggttctctgagcggcgatctcgaccgactggcgcgcgggcgtaaagcccgcgtgcaaatgcaggtggagctttttggcgacgataaacagggcgccgttttcgaggggatctacatcgtgctgccggcgaagccctttggctcgtacgaagagggcggcaacgaggaagagtaagcgcctgcggcagttatcgtcctggcgatgccacacgccaggcgatatcccgcatggcatcacgcgcggcgttgctgacgcctcccagctgaaagaagccgtggatcacccccagatagcgctgacaggaactctccaccccttgctccgtcagccttcggtacagcacttcgccctcatcacgtaaaggatcgaactccgccgtcaggatgtggaccggtggcagaccgtgaaaatcttcgcgccacagcggactggcatccggatgggtagcgggtgtggccgctaaatacatttcgtagccgctaagcagcgtgtcccgggtaatgatgtaatcctcgccgttgctggcgtagcttgccatgctggcggtagcgtcgagcatcgggtaaatcaggataagctgtgcaggctgccatgttcccgccgctttcaggcgcagagccgtgaccagggcgagatgcccgccggcgctgtcgccggccagggtgatgcgcgaagcatccacgccaagctgttttgcgtgctggtgaataatcgtggcacctcgttctgcatcatcgtgcgccgccggaaaggtatgctccggcgccaggcggtactgtacagcgatcacccggcaaccgctgaacatggctaactgacggagttggttatcgtgggtggtaaagccgccgctgacaaaacagccgccgtggtagtagataagcgtgggtagcaggccgtcggctgtgggcggtgaaacgacgcggaagtgcataccctccagggtgatatcctccacccgcactcgcgtttccgtctccccggcgagtaccgcactggcgatatagccggccctccgatcatcaatatgctgatcgcgtgatgacggacgacctgccgcaataaatgcctcaaccagcgaagcaatccctttttccagcgccatatgaagttccttatactgttttaatatccagtgttatagcctggattatggcgaaaagacaggcctgttgaggtcgcctgtgcattatggaaagcggctcgcaaaaaagagtttacctgacaaaatcctgtttgtttccgattccaaaagctatagattgctcataacttcatcactggtgatatacttgaggtatatatgagcatgatggctgaaagggatatgggcagaattcttctcgatttatcagacgatgtcattcaacgtctcgatgacctcaaagtgcagcgtaacattccgcgagcggaactgttacgtgaagcggttgaacaatatctggagaaacaagatcgagctaaagataccatctccagtgcgctgggtctgtggcaagactgcgaagaagacggcatggaatatcaacgtcagctacgcaaggagtggtaatgacctccggatctgcgctttttgataccaatattcttattgatttatttagcgggcgtcgcgaagccaaacaggcgctggaggcctggccaccgcagaatgcgatcagtctgattacctggatggaggtgatggttggcgctaaaaaatatcaccaggagcagcgcacgcgaatggcgctgagcacctttaatatcattaacatctcacaggatattgcagagcgaagcgttgcgctgcggcaggagtataagcttaagctgccggatgccatcattctggcgacggcgcaactccatcgtctggaactaattacgcggaatacgaaggattttgccggtattcctggcgtagtcacgccgtacgaaatccaccctgaataattcgagtggcaggaggacgacaagtgagcgataaactcgtctgaaacgaatatctccagccaaaggttggcctctgataacggtcagtgacgcgtgtgaataatccctgcgcacgttcgtgtcacaagaaggaaaacgggcgacaagagccgcccgaaatcatactgcagaacttactccccttcgccggggaacatgaacgggttaattgagcttctggcgaagccctcctgttccatgcgggcgtcgagcaccagggaggccaaatcgtcggcgacggcttcgactttcggatccttctcctgatacataatcttcaggtaggttccgcagtcgccgcagctttcggctttcaccgccgcctgctcgttgtccagcgaccagtagtgcaggtcgcggctctgctcgcagttgctgcacttgacgcgtactacgtgccactcagtttcgcacaggttgcagtgcagatagcgcagcccctgagtggtgccgatttgcacgatgctggagaccggcatcgagccgcacaccgggcagaactggcgctgttcgccgtattcggcgcgcgcttttcctgggatcagactggccatctgcgcccagtagagcgacagcgcagcccagatgaacggcgctttgtcgctactgacggaggcgaaatcggaaacaaacagcgcgctggccatctgctccagctcctgctcagaggctttttccagattctcaatgaccgccagcgccgggccgctcatctccggcttcagctcggcaatcagcgagtgcaacagcttgtgccagtgcttgtcgcgcggcaggacgtggatatccagcggcggcttgccctgttcgctggccgctttaatgcgggcggtgagatccatctgcagcggatggtcgtacagcactacttcctgggcatgggcaatcagcgcggcaaagcgcaggtaatcgcctagcgggttattagcggccagctcgcgcaagcgttcagcgcggcggttatacagatttttcagcctggggaacagtaacggcggaattgcttccgccgtgcgtttctcgctcgaacccagctcgtcttgcgggattatgcgaatactcattcagatgacttttcctgtttctggcggacctctcggtaccagcgcgggtgatgtttcttcgcccacgttttggtaacccagccttccaccatcgcggtaatggtgcctttcacccagagggcggcgtagatatgcaccatgataaccacaattaacgccactgcggcaaatgaatgcagcatcagcgcaaatcggatcaccgggattgagaaagccggcgcaaaatacggacgccagatgatcacaccgctcaccagcagcagtaccaggaagataatcgccgcccagaatacgcatttctggccgaagttatagcgcccggtatcgcccacctcctcgttgacgacgatcttacgaatattcttcgcccaaaagatatcatcccgattgattaggttgtgatgccagtaacggaaaaacatgatgataaacgacgcgaacatcaccaccccgacgaacgggtggagaattcgcgccagctgcggcgtgccgaggatatgcatcagccagttaaaggacgggaagaaaaagcctaacccgctcaccgccgccaggacgaagcagaaggcggtgacccagtggttgatgcgttccggcgccgtgtagcgcacgatggtgtcacgtcttttcatttgcgcacctcgtctttctcttcatgcagattgtcctcttcctcttccgcgcggttcggaccgacgccgacgtagtggaagatactggctgcgaaggtcgcggcgaagccgacggccgccagcggtttccagatgcctttccagaacttgacggtctggctgatctccgggttttccggcaggccgtggtacagattcggcttgtcggcatggtgcagcacgtacatgacgtgggtgccaccgacgccggccggatcgtacaggcccgcattgtcataaccgcgggttttcagctcagccacgcgttcgccggccagcgttttcatatcctctttggagccaaagtggattgcgccggtcggacaggttttcacgcaggcaggctcctggccgacggtcacgcggtctacgcacagggtacatttgtagacgcggttgtcttccgggttcagacgcggtacatcgaacggacagccggcgatacagtagccgcagccgatgcactgctcggactggaagtcgacaatgccgttggcgtactgaatgatcgcgccttctgacgggcaggccttcaggcagcccgggtccgcgcagtgcatgcagccatccttgcggatgagccattccagcttgtcgttttgttccacctccgagaagcgcatgaccgtccatgacttggcggtcaggtccgccgggttgtcatacaccccgacattgtgaccgacttcatcacgaatatcgttccattcggagcaggccacctgacaggctttacagccgatacaggtggtgacgtcgataagcttcgccacctcctgctggtggtcccgcgcctgaggcgcgggggtgaaaccgttagtcgcggaacgacgaataatatcttgcgattggtaagccataagtcgtctccgttacaccttttccacgttcacaaggaaagctttgaactccggcgtctgcgtattcgcatcaccgacgaacggcgtcagggtattggcaataaagccttttttcgccacgccctcatagccccagtgaataggaatgccgatggtatcgatatccttaccgtcaactttcagcgtgcgaatacgtttggtcaccaccgccttggctttgatatagccgcggttggaggaaactttcacggtatcgccgtggccgatgccgagcttattcgccagtttttccccgatctccacgaactgttccggctgggcgatggcgttaagtagcgcatgcttggtccagtagtggaagtgctcggtcagacggtaagtggtgccgacgtacgggaacttctcggccttacccatctgctcgagatcgcctttgaagacgcgagcggccgggttagagaccacgttcgggtgcagcgggttggttccgagcggcgtttcaaacggctcgtagtgttccgggaacggtccttccgccatcttgtcgatagcgaacagacggcccatcccttccggctgcatgataaacggaccgacgtcgctgccaggcgcggcggcgctgtagtccggaatatccacgccgccccatttggcgccgtcccatttcagcaactgacgcttcggatcccacggtttaccctgcgggtccgcggaggcgcggttatacaggatgcggcggttgagcggccaggcccaggcccagcccagggtattgccgagaccggatggatcggcgttatcgcggcgcgccatctggttaccttccggcgtccagctcccggcgaagatccagcagccgctggaggtggtgccatcatctcgcagctgcgcaaaggagctcagctgttggcctttcttgacgatcaccgcgccggttgccgggtcggtgatatccgccagcgctttaccgttgctttccatcgccacttcttccgatgccggctcgtgtggcgtggagtagttccacgtcatgttgagcaccggctccggcgccgggccaccctcttcggcatacatcttacgcaggcgagtgaagataccggcgagaatttcaccatcggtgacggcgatccccggggcgtccgcgcctttccagtgccactgcagccagcggccggagttgacgatagacccattctcttcggcgaagcaggttgagggcagacggaacacttcggtctggattttcgccggatcgacatcgttcgactcaccatggttttgccagaaggtggacgtttcggtattgagcgggtcgatagtcacgaggaacttcagcttcgacagggaagcgacgaccttgtttttgttcgggaacgaggcgaccgggttaaagccctggcaaatatagccattcactttgccctgattcatcatctcgaagtactgcagaacgtcgtagctcttatcccacttcggcagccagtcatagccccagctgttttccgcggtggctttgtcgccgaagaaggctttcatcatggagacgaagaacttcggatagttgccccagtagttgacctggtctttcagcagcggcttcggcgtgttagccgtcaggtaggtctgcaggtcggcctgtttttcgttcggcagcgacatgtagcctggcaggctggtggagagcaggccgaggtcggtcaggccctggatattggagtggccgcgcagggcgttgacgccgccgcccgccatccccatgttgccgagcagcagctggatcatcgccatggtgcggatattctgcgcaccgatggagtgctgggtccagccgagagcgtacaggaacgatgcggtcttatccggcgcgctggtttcagcaatgtattcacagactttgaggaagtcggccttcggcgtaccgcagatgttttcgaccacatccggggtataacgggaaacatgctgcttcagcaggttccagacgcagcgcggatgttgcagcgtagtatcgcgtttggcgaagccgttttcgtccagctcatagttccagctggttttgtcgtactggcgtttttctgcgttatagccgctgaacagcccgtcgtcgaagctatagtcctcacgcacgatcaggctggcgttggtgtaggcttcggtgtattcgcggttgaatttttcgttattcagcagatacaggatcacgcccgacaggaaggtaatgtcggtaccggaacgaatcggggtatagaaatcagccaccgacgccgtacgcgtaaagcgcggatcgataacgatgagcttggcgccgttatgaattttggcttccatcgcccagcggaaccccaccggatgcgcttctgcggcgttaccgcccatcactacgaccaggttggcgtttttaatatcaacccagtggttggtcatcgcaccgcgaccaaatgttggagcaagacttgctaccgttggtccgtgtcagacacgcgcctggttatccaccgccagcatcccgagggcgcgggtgaatttttgcgttaaatagccggtttcgttactggaggcggaggcgcacagcatcccggtagtcaaccagcggttgacggtggtgccggcgtcgttttgcgcgataaagttggcgtcgcggtcctctttcatcagcttggcgatgcgatcaaacgcttcgtcccaactgatttgctgccatttatcggagcctggcgcgcgatattccgggaatttcaggcggctttcagaatggataaagtccaccagaccagcccctttcggacagagcgcaccacggttgaccggatgatccggatcgccttcgatatggaaaatggatgctttggcgtttttcgcgccgtcgccgaggctatacatcaacagcccacagccgacagaacagtatgtgcaggtgttacgggtttcgcgcgtgcgcagcaatttgtactgccgtgtctccgcgagcgcagttgccggggcaaagcccagcgctgctgccgtggttcccgccataccgccagcgcagatcttaaagaactgccttctgctgacctgcatggttcgctccttgtttcgacattgtcacatgtagttatttgctttgcggtgaaggccgcaaaggttcagaattagggcaaatttccctcattcctgaagggataaaaacagaataccacattgtgtgtatgcctgttccaatacggttaaagcaaagtgaacaagaagcctctcgaacaaatcaaaaatgtgacgaatgtcacaggatatcgccaggtctccctctggaaacgcgaggatctgcaacaccctcagccagatgagttagcggaagaggtgcccgtcgcgctggtctacaacggtatctctcacgtggtgatgatggcctccccgaaagatctggagcaattcgccgtcggcttctccttatccgaagggattatcgagcaccggcgggagattttcggcatggacgtggtagcggtgtgcaacggccttgaggtgcagattgagctctccagccggcgttttatgggcctcaaagcccggcgtcgcgcgctggccgggcgcaccggctgcggcgtatgcggcgtcgagcagctcaatgatattggtaagccggtccagccgctgccgttcactcagtcgttcgatttagccaatctcgatcaggccctggcgcatcttaacgactttcaaccggttggccggctcaccggctgtactcacgcggccgcgtgggtccggttgacgggcgaactggcgggcgggtttgaagacgttggccggcatgtcgccctggataaattgctgggccggcgggcggaagtcggcgaggggtggcagcatggcgccgcgctggtctccagccgcgccagctatgaaatggtgcagaaggcggcgatgtgcggcgtcgagatcctgttcgcggtctcggcggccaccaccttagcagtggaagttgccgagcgctgcaatctgacgctggtgggcttttgcaagccgggcagggcgacagtttacacccatccgcagcgtttaattgcgggttaaatattggtcaataaatttgaacaatgacagcaaatccttccgctttttgtttagcgatgtgcgggatactatttaacacatcaaggcacagcgccttatctaaacaactaaatgaaagggtttatatcatgaaaagcatcaaaacttttgtcgcagtaatcgctatggccgcctctttcgcttccttcgctgctgaaaccgtgaccgcaaccgcctccacaatggacggcgcggaagcgaaaatcgccgcacaggcgcaggctgccggcgcttcgtcttacaaaatcaccgaagcgtttaccggcaaccgcgtgcatatgactgccgaactgaacaaataagcgtatagcaactgtcgaaagagcgcctcagggcgctttttttgttttcgttttccgcttcccgtctctgcgaaatttgccaatattttcctctgctacgaaaaaaatgtggcactaatcacgtttccgttcttttcttaaatcctcctttttatggcaaaggaaaggtcagcacgcctgaatatctcgattttttaacgccatgaaatttaaagatattaaaaacagaaagcgatggagatcactctctttaaatgtgatatttatcacaaaaataggcgtttcgccgtacctgtcaactattcactgcggtaatttaatacgcattatgtgatcttcattgcaaatagaaggcttgtactcagggaaaaatgttgtcaggcaaatgagcgaggatgcgtcatgaaaattggtatcgttattagcggcggggatgtttctggaatgaataattttatattccagatagccaggcaggctaatgctgatatcacgctgtttaatggcggtattccagggctactggagaaaagtcatcaggatatggcgtggcgcgatctggttgattattcaattaccgcggtgccgatcattacctcggggcgaaccagtcgcaaactgcagcgcagtgaatatgaaagcattgctaaaaaacttaaatctctgcgtattgatgtgctcattatggccgggggggatggcagcctgcagtttctgaatacccttagtgaatttgagattaattgctttggtgtgggaatgactatcgataatgatgtgtatggcagtgattatacgattggtttttccacggcctgtgagcaaattattaaagaagtctctcgtttaagaaataccggaagagcgctgcccggtcgggtttttatggttgagatattaggaggctattgtggagaactaacgttgcagtccgccattaaatgtaatgcggatattgccctgatcccggaggcacagatgccgttggccgtgctcgcggaacggattacccggaagctgagtgcgcagaatagcgtcgttatcctctgctcagaaggctataccaaagagtactctcccggctttcagggggcgattgataccatgattaaacagctggaaccacaaataggtgtccgtatccgtaaaacgatcgtcggctatggtttacgcagcggtgatccaacctgcgaagagatttatcagggcactattatggccagtgaagtggttcgctgtattcagtcaggtatgaaaaataaagccataataattaattccagtaacaaacctattccgattgatttagtcagtatgaaaaaacgtctggtcgatactgaaggacatcattataaacttgccaagcaactcaatattatttgaggagaccctccatgctgaaaattttatgcgtatgtggctgcggcctcggttcaagctttgccattgaaatgacggcgaaggcagttttaaagaagctggaaattcccgctcatattgaacacaccaccgtttccgaagctggggcttttaaatcagatatgattctgacgcaaaaaacctttgccgacatcttaaccgccgatgccagtgaagaagaaattaaacgtgtcgtggtgttgaataaacttactgataaagaggagattgaaactaagatcgtcgcattcttaaaagaacgtcatctgaaggtggctgattatgaatagcttcgtggcgtttatcgttaaggatttactcggccaggcatccattcttattgcttttattgccatgcttggcctgatcctgcaaaagaaatcgccaggcaaaaccgcggaagggacatttaaaacgctgctcggtttcttaattatgatggccgggataaacatcattgtcgccacgctgaccttcctgaatgatatcttcacccagggatttggcatgaaaggctatattaccgatgtggccgccatcgccgggttagcgaatcgggaattaggttcggaggtggcgctgacgctgctggtgatctttgccgtcaatattattaacgcccggctgacgccgctgaaatatatttttctgaccggccaggcgctgctgtggatggcgacgatcggcgccgtgattggctataagtccgggctcaccggcgtaccgctgattttaaccgggggcatcttcggcggcgtgatggcggtgttaatgccggccctggcgcagccggtggtcaggcgcattaccgggtctgacgatgtggccctggggcacttctgtactatcggctatctggtgcaggctgcggtcgctaaagttgtcggaaaaggctctcgctccacggaagatctcgaactgcctgataactttaagtttctgcaggatacctatctggccatggcggtggtgatggtgccgatgtatctcatcccggctatcgcggcggggcctcagtacatcgcgcagttctccggcggcattaattacctgatgtatgccttcatgcagtccattcagtttgtcgccggggtctttgtcctctatagcggcgtgcgtttattactcaatgagctggtgccggcttttcgcggtatcgcgatgcgtattgtcccggatgcaaagcccgctctcgattgcccggtgctatttccctatgcgccgaatgcggtgattgttggatttctggcaacgactgtcggctcgattatcggcatgctggttttcccgatgttcggcctggcgatgattctccccgggctgttaaccaactttttcgccggcggtacggcaggggtatttggcaatgcgctgggcggacgtcgcggggcgatgatcggcggggtgattcacggcctgtttatcacatttctgccggccattctggtacccatgctggagagctacggctttacgggcgtcaccttcagcgattcagacgtcatcagctccggtctggtattaggccacgccttccagaataactggctctttgtcgccttgtttattgtgtttgtcgccgcactggcatggtttgtaaacggtaaatccgctaagccgaaaggggaaagtgttcatgagtctgtataattttaatgagattttaaaaatcgctcaggaaagagattttaaagcgattggctcgtttaacttgcactgtattgagatgttaccggcttttttcaaagccgcgcaaaacagccgcagcccattaatgatccaaatatcaaccggtaccgcagagtatctggggtatcggttactggtcgatgccgtgcgttcattagcagacagtgaaaatatcccgacctgcctgcatctcgatcactgctccgatattaaagccatcgagacggcaatgaatgcgggcttttcttcggtgatgtacgacgggtctcacttaagcctcgaggaaaatatcggtaacacgcggattgtggtggaaatggcccggccgcggaatattacggtagaaggtgagctgggggcgatcggcgggtcagaggatggaaaagcggtggctgccgaagatatctgttttactaccgtcgaagacgcgacgcgttttgtgaaggagacacaggtcgatatgctggccgtctcggtgggcactgtgcatggcctgtacaccggtaaagcgcagatacagcatgcgcggctgaaggcgataagcgaagcgacgggcgtgccgctggtcctgcatggcggcacaggtgtcagcgatgaggatatgcggctggccgtcaccgaagggattaataaagtgaacgtcggaacggaaatgaacgtgcagtgggtcgatcgctgtaaatcaacgtttgagaaaggaaaagtaaatgacagcgtacggaaatttttaattcccgccaaccaggcagtgactgccgtattaatggaaaaaatggcgctatttaaatagcgtttttaccgacacatatcttttgttgccctgtcttccgccagggagggagcttgctatgtttgaatcattgaaaacgctgtggaaaaaagagcaaaacccgctgcaggattatgatcaacagtcccgtcagctggcggaagagatcgccagactggaaggcgaattacagcgccagcccgataatagcgacgtgcaaaaaacattgatgttgacttacaaccgggcattatcggtatatgccaaaagtaagagccaccggcaggatatcgatgcgctgtttctgcagattgataatttacgcaatattattcgccgcaatatctaggaacagagaatgaccataaaagaactgcttattgaggccgatgccattcaggttggcgttgtggagtccgactggcagcgggtaataaagctggctgcccgcccgctggaggcaaaaggctttatttcgacggaatatagccaggcggtgatcgacaatactttaaatcatggcgcttattacgtttttgatgaagggattgccatcccccatgcccgccccgaatgcggcgtcagacgcaactgctttagcctggtggtgctggaaaagcctattccctttgcggacagtgaaaaagcggacattgttattatgtttggcgcccgggacagcaatgcgcatatcgaggagggcatccgttccatcgtcgcgctgctggataataatgacaccatggccaaactgcggacggcccgcagccgggaggaggttgtcgcattactatgaacagacatctgaccccaggctgcaaaacggccattttaatcaacggcattccggcgtcggggaagagcaccattacccgtttgctggcggagacctttagcctgccggtattgacgatcgacggcatcaaagagccgtttatggcgcgcctggcccctgtcgaccggccgatgaatcgccagctgggctgcgcggcgtatgaggtgatctggtcgattgtcggcgcatcgcctgccagcatggtctggttgatcgacgcctggttcggctttcagccgcgggagaccttgcagagactgctacagcaggcgggcgtggagcaggtgattgaggtctggaatcatatctctccggagctggccgtcgcgcgctatgcctcgcggctggcgacgcggccgccgggccaccccggagaagagtatttgccggagctggcccagctggccgggcgggcgcagcccatgtcgttaggacctgtactgacgatagaccagcggcacccgctgcaaatcgaaccggttattcagtggcttgaaggcacgatcgccggacagcacagcggttttacagattacgcttactcgtcctagggcatacccgccaggcgcagcagcgcggtcaccacggcggcggcgataatcacgccgatcagcgggaccttgcgccaggcgaggaacacagcgaaagcaacgcccagaacgcgcgccataccggcgaaatgtgcgccctcatagaaagtggtggccagggcgacggaaaaaagcagcaccgtcgccgcatcggaaagcagcgcctgcgagcgctcggaaaatgccagccgattgccgagcttcgcgccgccgagacgcatcagataggttcccagcgacaggatggcgataccggcgataaacagcgtcatattgcccattattttttcctcgacagtaaaccgaacagcgaaagcagcactggcagcccggtgggcacaaacggtacggcggcaagcgccagcgcggcgccgctggcggcgcggatcagcgtagtgcggtttttaaaggccgggatcaccagcgccagcaggatcgccgggaagaccgcatcaagcccgatggtttccggcgctggcagcagtttgccgacggccgcgccggttagcgtaccgaggggccagatcagcgcgacgccagcgccgcacagccagtaggccgctttgcgctgcgcgggggtgggctgcgacaagccaaagaccacgctctcgtcgttcataatgtggcatccgataaagcttaaggcgcgccgaccaaccagttcgcgtacggtcaccccgaacgggatatgacgcgcattgactaacaggccggcggcggcggcggccagcggactaccgccgctggcgacaatgccgataaacatgaattcagaagcgcctgccagcacggacaccgaaagcaagagcggcacccataaagggaagccgtaagccaccgccagcgacccataggacatgcccaccaccccgacggcaaggcagaccaaaacaatcgcttttatcgtgtctccgctgagactggagagagtttgtttcatatcacttagccatatcgaacgaatttccattataatgaacacataatgatcgtttttcaaggcgaacgaattgttcgatataaaaaacaaggggcgggtatgacacagccaatcagcgttatcgccaaaagtctggtgcgggagcgggcgcggaccgggctttcgctggcggaagtcgcgcgtcgggcgggtatcgcaaaatccacgctatcgcaactggagtccggcaacggcaacccgagtctggaaacgctgtggtcgctctgcgtagcgctggatattccatttgccaggctgcttgagccgcaggtgaacaaaacgcaggtgatccgccgcggcgaggggaccaaagtggtggcagagcaggcgaactatcaggccattttgctggccgcctgtccgcccggcgcgcgtcgggacatctatttgctgctcacccagcccggcgccgaccgcatttcgcatccgcatccgccaggctcggtggaacatattatcgtcacccaggggcgggcgcgggtagggctgacgtcggcgccggaagagctcggcgagggcgactatatctgctacccggcggatcaggagcatgtttttcaggcgctggagccggatacgcaggccctgctgatcgctgagcaaaactgacatcgcgtcggcgggggacgcgcgctcgctggacgtcatagccatattgcgggaaactagctttcctatgcgaaaacagggatttttatgtcgctgaaagccattgccaaacaacttgggatctccgtcacgaccgtcagccgggcgttgaacggctacgacgatgtgtcgcaggagacccgcgcccgggttgaggctgaagcgcagcgccggggctatcgccccaacactttcgcccgccgtctgaaaatgggcaccatcgatgccgttggtctcgtcttccctgtccgccccgcgccgctcaacaataacgtttttctcgagatggtcggggagatcagccatgagctggcgcgccatgacattgatttgttgctgatcgccgatgatgagcaggcggataaacatggctatatgcgcatggtgcagggccgtcgcgtcgatgcattaatcgtggcccatactctggatgacgatccgcggctggcgcagctgcaggcctccggctttccgtttctggcgctcggccgtagccgcctggcgcagccctacgcctggtttgatttcgataactatgccggcacctgccgcgccacccgccatctgattcaacagggccaccagcgtatcgctctgctgggcgagaacaacaatcaggcgtttattttgcaacggcgtaacggctacctcgatgccctgcgcgaggcggggttatccgatgcatggctgcgtagcgtgccggcgacgcgccgcggcggctatcaggccacgctggagctgctgcgtctgcctgagccacctaccgcgattatcaccgactgcaacacccatggcgatggcgccgcgatggcgctcgcccacctggggcgtttaaccggcgacaatcgcgtcgccctggtggtgtacgacgggctgccgcaggacagcatcattgagaccgatgtcgccgcggtgatccagtccacgcgccagggcgtgggacggcagattgccgatatggtgcgtcgcttaatcgccggggaggatctcgccacgctgcaggtgctatggcagccggaatttatcccgggtgaaaccgcctgatctgacccctttttaacccgtaattctgaagccgatcacggatccgaaacgttttggttggcatccgaaacgtttcggatcaacagtaagacattccttgtgatggagatgtctgatgtctgattcgctgattcacctgcaaagcgccggtgccgatattgtaattaaaacccgccctttcgccgaaattgtctactggggaccgcatttaagccacttttcgccgcaggatgccgacagcctgatgcgcccggtcgccaacggtagactggatgtcgattcgccagtgaccttaatggcggagctgggccatggtctgtttggcgcgccgggcattgaaggccatcgtcaggggctggatgcctctccgctgttcaccaccagcgaagtgcggcacgagggccagacgctgaccctggtcagcgaagatccgcaggccggcctgcgcctgcagagcgagatcgcgttggatgccagcggcgtgctgagcgtgcgccatggcgtgaccaatctgcgcgccagcccatggcaggtggatcgcctggcggtcacgctgccggtcgccgaacgcgctcgcgaggtgatggctttccatggccgctggatccgcgagtttcagcctcaccgcctgacgctggagcacgacagctttgtgctggagaaccgccgcgggcgcacctctcacgaacatttcccggctctgatcaccggcagccgcgcctttagcgagatgcagggtgaagtctggggcgtgcatctggcctggagcggtaaccatcgcctgcgggcggaggtgaaaaccgatggccgtcgctatctgcaggccgaggcgctctatctgccgggcgaaatggcgctggcggaaggggaaaccttgtggacgccgtacctgtatgccagctactcggcgaatgggctgaacggcatgagccagcagttccatcgttatctgcgcgaacggattattcgtttcccgggcaacaaaccgcgcccggtgcatctcaacacctgggaggggatctatttcgaccacgacccggactacatcatgcgtatggccgacgaagcggcggccctgggcgtcgagcgctttattatcgatgacggctggtttaaagggcgcaacgacgactgggcggcgcttggcgactggtatctcgatgagaaaaaatacccctacggcctgacgccggttatcgatcacgtgaagtctctgggtatggaattcggtatctgggtggagccggaaatgattaacccggattccgatctgtaccgggcgcacccggactgggtgctggcgctgccgggctataccccgctgaccggccgccatcagtttgtcctgaacctcaacattcccgaagcgtttgattatctgctggagcggatgagctggctgctgggcgagcatgcggtggactacgtgaagtgggatatgaaccgcgagctggtgcagcctgggcatcagggacgcgccgctgcagacgcgcaaacgcgccagttttaccgcctgctggatacgctggtggcccgtttcccgcacattgaatttgaatcctgctcctccggcggcggacggatcgattatgaagtcctcaaacgcagccatcgcttctgggcgtctgacaacaatgacgcccttgagcgcaacaccatccagcgcggcatgagctacttctttccacccgaggtaatgggcgcgcacattggcaatcgccactgtcatgccaccttccgccagcatagtatcgccttccgcggcctgacggcgctgttcggtcatatgggccttgagctggatccggtgagcgccgatgaagaagagcgcgccggataccgaaaatatgcagccctgcataaacagtggcgcgacgtgatccatcacggcgtgcagtggcgaatagatatgccggacgccaccactcttgcccatggcgtcgtcagcccggataaagcgcaggcgatcttcctcgttagccagctggcgatgccggactacaccctgatggcgccgctgcgcctggcgggcctggaggcgagcgcccgctatcagttgacgctcctcgatcatccgaacattcagatcaccggtgagggcggccacaccatgcggaagctaccggcatggatgacgacgccgcagacggtgagcggtgagtggctgcagcaggcggggctggcgctgcccatcctcgacccggaaagcgccattctgattggtctgcaacgcgtgtgatggtatcgggccgcgctgcggcccttcttgaggaaaatataatgaacccgaccgtctgtacccacaaaaacaaccccaacttctggattttcgggctgttcttctttctctacttcttcatcatggccacctgctttccgtttctgccgatctggctgtcggacgtcattggcctgaataaaaccgaaaccggcctcgttttctccagcctgtcgctgttcgccatctgtttccagccgatcctcggagtgatctctgacaagctggggctgaaaaaacacctgatgtggatcgtgaccgttctgctggtgctgattgctcccttcttcctttatgttttcgctccgctgctgaaaaccaatatctggctcggggcgctgagcggcggcgcctatatcggctttgtattctccgctggcgccggcgcgatggaggcctatatcgaacgggtaagccgcaacagcgggtttgaatacggcaaggcgcgcacctttggctgcctgggatgggcgctgtgcgcgactaccgccggaatgctgttcagcattaatcccgaatgggtgttctggatggggtcggccgccgcgctgctgctggtggtgctggtggccatcgccaaaccgcaggccagtcagtccgcgcaggtgatggattcgctcggcgccaatcgcccggcgatcgatttaaaaacggcggtgcgcatgttccgccagcgtaagatgtggatgtttattctgtatgttatcggcgtggcctgcgtatatgacgttttcgatcagcagttcgccactttcttcaaatcgttcttcgtgaccccggaagcgggcacccgcgcctttggtttcgccaccaccgcgggagaaatatgtaacgccatcattatgttcagctcgccgtggattattaaccgtatcggagcgaagaataccctgctgatcgccgggatggtgatggcggcaagaatgattggctcttccttcgccaccaccgccgcggaagtcgtagcgttgaaaatgctccatgcgctggaggtgccgttcctgctggtgggcgcctttaaatacatcaccggcgtgtttgacgtccggctgtcggcgaccatttatctggtgggcttccagttcgccaagcaggtggcggcgatctttctctccgctttcgccggcaatatgtacgatcggatcggctttcaggatacctatatgatcctcggcggtattgccctgaccgtcaccttaatctccgcgtttacgttagcgggtaagacgaaaaccgagccgctgcgcgataatgcaatgaccgtttaaacgaccggcctcccgtctggagggaggccagttatttttacgccagataaaacacttctttgagctccgcgctcagcgggctgttgtccgggttgctgggcatcacctcgcgcatgtatttccaccaacgctggcatacttccgtgctggcgaccgcttcccagcgggcttccgattcaatctccaccgtcgcgaacaggagatggcgttctttatcgagatagatggcgtagtggtgcgcgccgtgcgctttcagcacagcttccagctctggccagatgtggttatggcggcgctggtactcctcgtgcgcgtcggggttcacctgcatgacgaaggctttacggatcataaggcctccagatagagctcgcgaacctcatcgcggctggcggggcgcgggttacacggcgcgcatgggtcggccagcgctttatccagccagccttcgatatcggcttttctgacgccaagctggctaaaaccctgggggatccctacgcgtttgctcagcgtgcggatggcattgatggcctccatgctggcagcttcatcgctcatgccgcgagtatcgacgcccatcgcctgcgccacgcgggcaaagcgcgccaccgcgttcgggcggttaaagttttcgatgatcggcagcaggatggcgttgcataccccgtgcggcagattatgggtggcgccaggctgatgggccagggcatgtaccagcccgagaccggcgctgttgaacgccatgcccgccagatactggccaaaggccatctgctcgcgggcctgcagatcgtgcccatcgtctaccgctttcggcagccacaggttaatcagacgaatggcctcgagggcgttggcgtcggtcaggggatgggcgccaacggagacaaaggcctcgatggcgtgggtcagggcatccatgccggtggcggcggtaacggctggcggaatgtcgagcatcacgctggcgtcgtcgacggcgatatccgggatcaggttcgggtcgataatcacctctttcacctgccgctcgctatcgataattaccgcgttgctggtcatctccgccgccgtgccggcggtggtgttgatggccaccagcggcacgccagcgtttttcactttgccgacgccggagtaggcggtggaggagcctgggtttgcggtgaggatttttatcgctttggcggtatcaatcgggctaccgccgccgaaggcgatcaggtaatcgcagcgggccgcctggtaagccgcatagccttgctgcaccagcgcttcggtggggttggggaatacctcgtcaaatagctgataagccatctgctgttcatccagcgcggcgaacaggctgtccagcaggcccagcttcaccagctgaccgtcggtgacgatcagcgccttgccccactgtttgcccgctaccagcttgaccatatcaccgatcgcgcctgcgccgtggaggctgattttaggtagtgccaacataaaactcatgataattctccttaatgttgattttgggaaatccgtttcccctaccctgaccctctcccgcagggagggggccagggtgagggggaaattaacatcgtcttcgctgcatcatccgccgggtaataatcggcagggagatcaccacgatcagcatggcgccgataatcaccgacatcacgatgccggggacgttcagcaggctcaggccgaaggtcaccagccccatcagaaaggcggcgatgatcaccccgggcatgctgccggagccgccgagaatattgacgccgccgagcaccgccatggtgacaaccgccagctcccagcccatcgccagggtggggcgggtactgccgagccgtgaggtcagcaggaccgccgccagcccggccatcagcccaaccagcgcgaacagcaccaggttatgacgcttaacgttgatcccagagaaccaggcgccggtcgggttattgccgatggcgtaggtccggcgaccaaagttggttttatgcagcaggaaggtgaaggcggccgcgaggaggataaatagcgcaaactcaaaagagagcgccccccacacgtacccctggccgaaccaggcaaagctctccggatagtgattgagtgcctgatcgcccagcagtatataggtgatgccgcgatacaggctcatggtgccgatggtgatcacaatggacgacaggttaaagcgagtcaccagcaagccgttgaacaggccgcacagcagacctacgcccaggccgatgaacaccagcagcggagtgtccatccccgccgccgcgcagaagcccatcaccgttgagctgagcgccatcgtcgaggctaccgacagatcgatttcccgggcgataatcagcatcgccatcggcaggacgacgatcgccttctcggtaaaggtaaaggtggcgtccgacaggttccagatattgaggaagtacggggaagccacggcgttgccgataaataccgccagggtgaccgccagtaaaaacccttcccagcacagcaggcggcgcagtggcgacggcgcggccggggcgtttttcatctcttcagataccatcattttgctcatgatttcaccgcctgtttctgtcgggctaacgccgcgttgcgcaggattaaccgcccgtgaccgcgattgccgcgctcgttgagcagcaccgccatgacgatcaccgccccggaaatcgccatttgccagaagggcgagatgccgatcaccggcagggcgttattgatgaccccgaggaacagcgcgccgcacaggcagcccagcacccgtccgcttccgcccatggtgctgataccgccgatcacgcaggcggcgaccacctggagttcaaaaccgttggcgacgtcgacataggcgacggcgaagcgcgagatccacagatagccgcagaagccggccagcgcgccggagagacagaagctgacgaactgcatttttccggcgttaatgccggtgtagtatgccgccgtcgcgttgccgcccgcggtgtataaggcccggccggtgcggctgtagcgcaggaaataacccaccagcagcagcgcggcgatggcgcaccagctcagtagcggcagccccaggagggggctgcgcggcagactgagaaaatcagcgctcatctgatgtgagttaacccagccgccgtcagtcagcaggaagataatgccgcgataaatgctcatggtgcccagggtcaccacaatggcgggaatgccgaggcgccagaccagcaggccgttaattactcccatcagcaggcccagcagagtcgccagcgccagcagcgccaccaccggaatacccggatagtgggcgttaagcagggcgacgatcatcccggtcagcgccaggttggcggccatcgacagatcaatgcctttggtgagcaacaccatcatctggccgagggcgaggatgataaggatggcggtatcgttaaacatctccaccagattgcccggtgaaacgaacgacggcgcccggctgccgatggcgccgatcatcaaaataatgaccaccgccagcagcgcttcgcgatgtttcagccatgcgtgtcccatcatgccgcctcctggccgatgccgctggcggcgctaacgatggtttccgctgtcgcttccccggcccggtactcggcgaccatcagcccttcgtgcattacgataatccggtcggccatgcccatcacttccggcagctctgacgacaccataatcaccgccagcccctggctgaccagctcggacataaactgatgcacggcggcctttgagccgatatcgatgccttttgtcggctcatcgagaatgatcacctcgggctgggtcgccagccatttgccaatcaccactttctgctggttgccgccggagagggtctccaccggctgccgccagctgaaggcttttacctgcaggcgcgaggcgtactcgtcggccagccgccattcccgggcgtcgttcaggacgccgttagggttgagcttgctgagctgcggtaaactgatgttctgggcgataggcagggcgatgatcgctccctgtttctgccgctcttccggcacgcagacgatgcccgcgcggatggcgtcggcgggctggtgaaagcgcatggttctgccgttcaggcggatctcgccggaggaggggcgcgagacaccggagagcgcctgcatcagctcggtgcgtccggcgcccaccaggccgtaaaagccgagaatttctcccttgcgcaggcggaagctgatatgggcaaactcggtaggatgacagagatcggtcacctccagcaccgtttctccgggtgtgcagtcgactttcgggtaggtttggctgatcgcccggcccaccatcatcgacaccatccgctcttcggtgatgtcgcttatcgccccggagctgacgtacaccccatcgcgcaggatggtgtaataatcggccagctcgaagatttcatcgaacttatgcgagataaacaggatcgctttgccgtcctgcttcagacgctcaacgatgtgataaaactcgaggatttcatgctgggaaagcgcggcggtcggctcatcgaggatcaccacctgggcgtcgaaagccagcgcccgggcaatcgccaccatgtgacgctgggcgatgctgagggttttcagcgtggctcgcgggtcgatctggacttccagccgggtgaggatctcgttggctctgcggtgcatcgccggccagtcgagcgttttcagcagtcccttatacagatactggccgacgaaaatgttttcgctgaccgagagttcgtcaaacagcacggtttcctggtgaatggcggtgatccctaccttatgcgccgactccggcgttggcagatgaatggggatcgctttatagaggatctcgccctcttcgggctgataaataccggtcatcactttgaccagcgtggatttccccgcgccgttttcgccgattaaggcggtcactttgccgggccagagatcaagctgcacgttctcaagggcgcgcacaccgggaaaaatcttggtgatccccttcagcgacagcagtggcgttgatgctgacatgatagttctccacaaaaatcacccctcaccctaaccctcccccacaggggcgagggaacggtccggcgtccgctggccgcatcgcgcagagggccagccgttccccctctccctccgggagagggccggggtgagggaacaaggattagaaaattttcgagaacttatcgatgttgctcgcatcgtagacaaacggcttggccatcgcgccattcccctcggcgtccagattcactttgcccagcttgcccatactggcttcggttttggtcgccgtgcctttgactaaatcgtcggccagataggtggcggcgtagcccaggtcaatcgggttccagatggcgaagcttttgctggcgccggacttgatcgcgccggccatttccgacggcagccccagcccggtgacatacactttgccgattttgccctggtccttcaccgcctgcgcggcggcaacaatccccaccgacgacggcgagacaatgactttcaggtccggatatgatttcagcagacccaccgcttcgcggtagcttttatccgacagatcgtcaccgtaggcgacggtgaccagctgcaccgacggatactgcggtagcacctttttcatctcctcaatccagatgttctggttcgtggaggttggggtggcgcttaacacggccacctcgcctttctcaacgttcagcgcctgcagcgcatcggcggcaagcttgacgttggtttcgccaattaaggcgttatttgaggggttaagatggatctgacggcctgccggcgccacgccggagtcccatgagaccaccttgatgccgcgctgcatcgcttttttcagcaccggcaccaccgcgtccggatcgttggcggaaatggcgatcgcatccaccccctgggcgatcaacccgttcagcacgtcgatctgcgcctcggcggtggtagtggtcgggccggtgtagatcactttgacatcacctaactccttggctgcctgttgggcgccaacgttggcggcttcgaagaagccatttcccagcgatttcgccacaagggcgattttaacttcggctaaggcggaaccggacaacgccagggcggcaacggtgaggatcaagcttgtctttgttttcattgcttttactccacatgagttagttttgtagggtttgcaggtgatatttcgccccgtctcggtgagcggggcgcgatgttgttatggataaagatctaaagcggactgcagcggctgcacgttgaagcgtttgccaagggcgataagctcgtcgcgggtgatggtctgcttcatcccgcccatcgacaagactttcaccagcacttcggcggacttctcggcggtatcgatcaggccgaaggtctcatccagcgtggggccgctgccgaagacgccgtggaacggccacagcaccagcgagtgtttttgcatggtttcggcggtcgcctggccgatttcatcggtgcccggcaccatccacggcagaatgccgacgccatccgggaagaccaccagacattcggtgctaccttcccacagcttacgggtgaaaagatcgctgtggttctccagaacataggtcagggcgatcaggttggtggcatggcagtgcatgatcacccggtctttgccgccggtcagtttgatgcgctcgctgtgcgacaggaagtgtgccggcagctcggaggtcgggacggcatcctccgtcaggccccacaggatatggtatcccgcgccgtcgctgtcgaccttcaccacgccgaggttagcggccgggtcgagctggacgttacggaagaatttgccggagccggtgacgataaacggctggttggccagggttggcatcggctggctgagggcgatatagcgcggtttggcgtggaaatccgccgcgtaaggttcgatatccgcttcatccagacgcagcgtcaggttgccgccgttgcgttcgtcccagcctttcagccaggcgtcggaggtggctttgatcatgccctggacgaaccaggcgtcgataatggtctgcatagtcttgtctttcctgttgattcggtgcggggttgaccccctcaccctaaatatgtgcgtgcccccggattgcgccgtaaacggcttatccgggctaccggttcgtagcccgggtaaggcgtcagccgcgacccggggaagctcgtgcattacccgcgctggctcagaaccgcattctcataagcccgtacgctgtccagccactggctacccgccggcgtgtcgtgacgctgacagtacatctcccagatggcctgccaaggcagcgatttttgctcttcgagcagcgccaggcgggcggtgtaatcgccgtcgttctccagctggcgcagctgggcggtcggttccagcagggcgcgcagcagcgcttttttcatattgcgggtgccaatcacccaggccgcgatgcggttgatggaggcatcgaagaagtcgaggccgatgtgcacgcggtcaaacaggttatggcgaatgatttcgctggcgatggcctgggtttcatcatccagcagcaccacgtggtcgctgtcccagcgcaccggacggctgacgtgcagcagcaggcgcgggatgtagagcatggcggcggagatcttgtcggagatcacttccgtcggatggaagtggccggcatcgaggcacagcgccgtctgacggctggtggcgtaacccatatagaactcgttggagccgacggtgtagctttcggcgccgatgccgaacagcttgctctccacggcgtcgatatggtgcgccgggtcgagcttctcgctgatcacctcatccagggcgttcagcagccgctggcgcggggcgaagcggtcaacggtaatatccttcatgccgtccggcacccagatattcatcaccgacggcgtgcccagctgttcgccaaaataagcggatacgcggcggctggctttgcagtggtcgatccagaactggcggatctcatcgttggcgtgcgacagggtaaagccgtcggcgctcagcggatgcgagaagcaggaggggttgaaatccagccccagtttgttggctttcgcccacgtaacccagtttttaaagtgctccggcttaatctcattgcgcgctaccggcgcgtcggattccaggtaaatagcatgcagattgagacgctttggccccgggatcaggctcagcgcctgctcaaggtcggcgcggagttcttctgcattgcgcgctttgcccgggtagttgccggtcgcctggatgccaccggtcaggcttcccgccgggttttcgaaaccggcgacgtcgtcaccctgccagcagtgcatggagacgggcagacggtccagctggcgcagggcctcctcgacatccacgccgacggcggcgtagcgctgcttagcaatttcccaggcttgttcaagttgagtggtcatgcgcaaagctccttggtctgttgtggctgaaactgcgccacgaaacgggcaatttcactatcaggattgggggtaaaagtggtgagcgccgcgttgccgcgcactacctgacgaaactcatcgacattggccagctcgtcgagggtcattaactggatgccgatattgccgagggtggaggcctctatcgggccggccacgacgacgatcccgcaggcgtcagcgcacagctggttgagcagcgtgttctgacagccgccgccgacgatatgcagctggctgaaagggtggccgcgcagcgccgccagctcgttaagcacccgggcgtagagcagcgccaggctgtcgaaaatgcagcgcgccagttcggcatcgctttcaggaaccggctgcccggcgtcgcgacaggcggcctggatctcggcgctcatactggccgggttgataaagcggtcatcgttgcagtcaattatgaagcggcacgccggtagcgcggcggtgcgggcgatcagcccctgcaggtcgctgacgttttgctcttttagcacccgctgcagcagccacaggcccatgatatttttcagcacccgatagcggccttcggctccgccttcgttggtgatattggcctgcagcgccgcgtcgcaggtgtacggcgtcaggctttcaaaccccatcagcgaccaggtgccggaggagagataggcggcatggcggtcggccagcggggaggcgatcaccgcgctggcggtgtcgtggctggcgacagcgactaccggaattcggttaccctgcgggcagatccagtggcctatcacattgccggggtgggtcggctttccgaaccacgccaacggcgcgccggtccagttcagcaacgtctcatcccagctatcgctgttaatgttgaccagctgggtggtggtggcgttggtatattcccagttcagattgccggtcaggcggaagctgaaatagtcggggatcagcagggcatgggcagcctgactgaccagctccggctgctgctccaccagcgcgcgcagctgataaagcgtgttaaacggcaaaaactgaatgccgctgcggcgatagatttccgcccggcccagctgcgcttcagcgtgacgcagcaggccctgggtgcggtcgtcacggtaggaaatcggcagcccgacgcgctgaccctgcttatccagcaggacataatctaccccccaggtatcgatgccgatactgtctatcagaatgccctgctcacacactttctccagcccgcggcggatctcgccttccaggctatctacatcccagcagtcgaagccgtctactttctgcagactattggtgaagcgatgaatttcgcgcagcgtcagggcgcgcggcccgggctgatagctggcgagcatcacccgcccgctggaggcgcctaaatcgacagcgacacaatgacgaatactcatgaaacgatccttcttaaaatcattgtccgcagtctaaaaaaggccgtttactgacaccttctcgttacggacagccaaaactggccgctggcaagaaagcaaaggtgaccgtgagggacatcacagtttgcggttttaggggatggcgagggggatgtgatggcctccgcagttccgcatctttccggctgattcttgaaaaagcggcaggatttacgaatttcgcggtcaaaaattgaaggccggatagccaacccttcattactatcagccggtgactgataatttttctcattacgagggtggcatcatgaccatattgcacagtacggatttctttaaggccgggatctcgacggtggctattgaaccccgcctccctcagtcggcctttccggaacatcaccatgatttccatgaaatagttatcgtggagcagggatcgggtattcacgtcttcaatggccagccctataccattggcggcggttcggtctgttttatccgcgatcacgaccgccatctttacgagcacacggataatctgtgtctgaccaatgtgctctatcgcgcgccggatgcgtttcgctttctcgccggggtcagtcaactactgccccaggaacaggaaggaaactacccctcgcactggcgggtgaatcaaaccgtcctgcaacaggtgcggcatatcgtggcgcagatcgaggccgtggggagcgatacggatactcatgccgtcgccagccgtgagatcctgtttatgcagctgctggtgttgttacgtaaaagcagccttgcggaagaggccaccaacaacgatgcgcggctgaatcagctgttggcctggctcgaagaccattttgcgcaggagatctgctgggaggaggtggcggcgcagttttcgctgtcgctgcgtacgctgcaccgccagctgaagcagcagaccggtctgacgccacagcgctatcttaatcgggtgcgcctgatgaaagcccgccacctgctgcgccacagcgatgaaagcgtgactgatatcgcttatcgctgcggcttcggcgacagtaaccacttttcgacgctttttcgccgggagttcgactggtcgccgcgcgatatccgccaggggcgcgacgccattcttcagtaacgcgagaagagtcaacgtattgcagactaaaaacgcgaataatgcgccgttatccgcgtttggagtgtgagccgtggccggtctgattttacgtaaagaggagtttttcccttccgccacacaggcagtggcggtggcagaccgctacccgcaaaatgtctttgccgaacatacccatgagttctgcgagctggtgctggtgtggcgaggcaacgggctgcacgtccttaacgatcgcccctggcgcattacccgcggcgatctgttctacattcgcgccgaagataaacactcctatgcttccgttaacgatctggttctgcagaacatcatctattgcccggagcggctgcagctcaattttgactgggccggggcgatccctggcctcttcggcacgccgtggaagccccactggcgcatgggcagcacaggtatggcgcaggcgcgccaggtgattagccagcttgagcatgagtgcgcccggcgcgacgcgcagggaaatgcgatggccgaactgctttttgcccagctggcgctgacgttgcagcgccatcgctatgcgacggatgatcccgcggcgacgcagcgcgaagcgctgctggacaaactgctggccgcgctggcggccagccttagccgcccctttgttctggagcgtttctgcgagcaggagggcggcagcgagcgggcgcttcgccagcagtttcgccagcaaaccgggatgaccatcaatcactatttacgccagctgcggatctgccatgcgcagtatttgctgcagcataccgagcgcttaatcggcgatatcgccatgcagtgcggctttgaggacagtaactacttttcggtggtttttagccgggaaatcggcatgtcgccggggcaatggcggcagcgcagtcgcgccgccgcctgaagagcgtcgttgtcaggcagatgatccggtgattaactggccattcccagaccgacgatattggcggcgatgataatcaccacgcagccgaggctcaggacgctcaccggacggcggccggcgttgttccactccttcagcaccagacccaccacaccgccgcacagcacgtagaaactcatgtgcagcatccagctcatataatcatactgcgccggaatgctggcgtggccccaggcatagaagaagaactggagataccacatcagaccgccgagggcggagagcagaaggttgctgatgataagcggtttggccagcgagaaatcggctttgactgacaggttcttcactttcgccagacgaataaagcagaagccaaggttaaccagcgccccgccgcccataatcaccacgtagcttggcagcgctgcgtacagcgggtcgacgccgagcgccgcggcggcatcatgcatcggtttggcggcgttcatcgcgaacgacatccctgcggagaagataccgcacattaccgccagcagaagccctttcttcagattgaactcttcggctttgatgcccattttgcgctctttcagctggcctgcgcgggtgacgatgccgacgccaatcaccgccaccagcacgccgagcagcgtcatttgaccgccctgggtgtgcatcagcactgcaaactgaccgttaataatcggcgtcatcagcgtgccgacaatcagcgtgatgccaatggcgatgccaatccccatcgacatgccaagatagcgcatggtcaggccatagttgatattaccaatgccccacatggcgccgaacagaaagaccggcagcagcgtggaggcgctaaaagagcggtagtaggcccagaagtcgggtaacagcgtggcgctgatggcccagggcagaatcagccaggagacgatccccccgaccgaccacatggtttcccacgaccagtgttttacttttttgaacggggcatagaaacaggcggcactggcggcccctatcaaatgccaaaaaatacccatcgtaatcgcgtggttcattgattttatcctcatctttttttatcggagacggcggcttccgatgggatgagtgtaaaaattggccgctttggccgccttcaggacgttgccacaggatggcgaaccctggcaaccatgggcttaattagttgttctacatcacaaaacgacgggtatttcttctggttatatccatatgaaaaatacggcattgataagcattttcaataccatttaattaactataatggacaaactgcttacgcggcgttaacacttgagccgctcgacaataatggagatgattatgagctataccctgccatccctgccttacgcttacgatgctctggaaccgcacttcgacaagcagacgatggagatccatcacactaaacaccaccagacctacgtgaacaatgccaacgccgcgctggaaagcctgccggagttcgctaacctgtccgctgaagagctgattaccaagctggatcagctgccggctgacaaaaaaaccgtactgcgtaacaacgccggcggccacgcgaaccacagcctgttctggaaaggcctgaaaaccggtaccaccctgcagggcgacctgaaagcggctatcgagcgcgatttcggttccgtggagaacttcaaagcggaattcgaaaaagccgctgctacccgtttcggctccggctgggcgtggctggtcctgaaaggtgacaaactggccgttgtctccaccgccaaccaggattccccgctgatgggcgaagccatttccggcgcttccggcttcccgattatcggcctggacgtctgggaacacgcttactacctgaaattccagaaccgccgcccggactacatcaaagccttctgggacgtagtgaactgggacgaagctgcagcgcgttttgccgccaaaaaataaggttgcattgcgctaaaagagaagcgagtctgatgactcgctttttttatatctgtagcaaggagagcagccatgcattatccggtgaatgtctttgtcggcaaaatcagggactacgcgggcagtcgccccagcgcgatcggcaaaatccaggtcgacggagaattgcagctcggcgatctcggtctcaatggggaccagcaggcggagaagaaaatccacggcgggccggaccgcgcgctgtgtcattatccgcgcgaacactatgccgactggatccgtgacttcccccagcaggccgagcggttctgcgcgccggcgttcggcgaaaacctctccaccaccgggcttaccgagcaaaacgtttatatcggcgatatctttcgctggggcgaggcgctgatccaggtcacccagccgcgatcgccgtgcttcaagctcaactttcattttgcgatcaatgatatggcgcagctgatgcaaaacagcggaaaaaccggctggctgtaccgggtgattgccggagggcaagtttccagcgatgcgccgctcgagctggtttcccggctgagtgatgtcagcgttcatgaggccggggcgattgcctggcagatgccgtttgatgatgatcagtaccaccgcttactgtcggcagcgggcctgtctgttagctggagccgaacgatgcagaaacggcgtttaagcggcaagatagaggatagttcgcggagattatgggggaaataatcccccatattaagtattcccggggatgctcccggcgcagcgccgcacagcgcaggccgggtcggcgtcaggttcgtttatacagcggcagccagattgttaaacgcagaccacccagcgggctgtcgtcggccttcacccagccgcggtgctgctgaatagcggtttcgacaatcgccagccccaggccggtgccgccggactcgcggtcgcgcgcctcgtcggtccggtagaatggccggaaaatctgttcgcgatcctccgggctgactcccgggccgtcgtcatcgacgttaaccgtaatcccgtctttatccaccgagaagctgacggaaattttcgtatgcgagtagcgcagggcgttgcgcacgatattctccagcgcgctttccagcgcattggggttaccgtacagcggccatgggcccggcggatactcaacggtgaaagatttccccatctgctcggcttcaaacgccgcattgtccaacacttcgttccatagctgattggctttcaccgtctcgctgaccagggcgtttttcgcctgattgcgcgacatcaccagcaggtcgttgatcatgctgtccagccggtgcgcttcagtttcgatacgctccagctccttactctctccgctgcggcgacgcagcagggcggtacctaattgcaggcgcgtaagcggcgtgcgcagctcgtgcgagatatcggacagcagccgctgctggctggtcatcatccgctccagggccgtcaccatctggttaaaactggcgccagcggctaaaaactcctgcggcccggcttccagctccggatgctggcgcaggttgccctgggcgacttcatcggcggcatttttcagcttacgcgccggtttcgccaggctccacgccagccacagcagcagcggggcgctgaccagcatcgtgacgatcagcagcagcagcggccggtcaaacagcaggttgataaagtcggattgtgaggtgctggcgggacgaatcagatagagctgatagttatcctccccgtcccggacggaaaacgggcccaccatttccaggcggccatagcgttttttctgcggatgatcggcgttatcggcctggccgataaagttacgaatgatctgcatctcgttgcgttctgcgccgatcacgcggccttcgctggtcaccagcagcaggcgttgtcccggaggcgcccatttatcgatggcgcgaaacaaacgacgccaccacatcaggtcgtttggcggatcgttggccagctcggcctcgacgtgctgctcgatcatgatgccctgacgctgctcgctttccagcagctcggtcatctgccgggaatccagtttgggcaacatcagcaccagcatcaacaccagcgccagcgtgagccagaagatggcgaagatgcgtgcagtcaaacttccaatcatgaagcggaaaccatcagatacccgcggccacgcagcgttttaaaccacggatggccatctttgcgctccggcagcttacgccgcaggttggaaatatgcatatcgatggcgcggtcgaacggcgtcaggcgcttgcctaacacttcctggcttaaatgctcacgggagactacctgaccgagatgctgcgctaacaaatagagcagggtgaactcggtgccggtgagctccagcgtctggccatcgaaattggcttcctggcggcccggattgaggcttaaggcatccacttccagggttggtgagccggcttcggtcgtctgctgctgctcgctccagtgggaacggcgcagaatcgcgcgtatacgggccaccagctcgcgatcgttgaatggcttaggcaaatagtcatccgcgcccagctcgaggccgagaacgcgatccagctcgcttccgcgcgctgttagcatgataaccggagtctggtgtgtctgacgcagctctttcagcgtatcgataccgtttttcttcggcatcatcacgtcgagcagcaataaatcaacgctgtcgtccagaagggccagcgcctgttccccatcatgggccaccagcacgttaaaaccttccatatcgagcagctcttttaacagggaggtgagctcccggtcatcatcaactaacaggattttattcattgtttaaatacctccgaggcagaaattacgtcatcaaggcccgctaatccatgactttacgttgttttacaccccctgacgcatgtttgcagcctgaatcgtagactgtctctcgttgaatcgcgacacaaacgttttgggagtatgtgatgcgcaatgttatcgctgccgtcatggcctcaacgctggcgctaagtgcatatagccaggccgctgaagtcgttaccagcgttaactggctccccggagacgaagggggacagcgcggtagccaaagccatatgtttgacggcataagtttaaccgagcagcaacgtcagcagttacgggatcttatgcaacgggcacgccacgacaggctccccgttaatgttagcgaaatggagacaatgcatcgccttgtcaccgcagaaaattttgatgaaaacgctgtgcgcgctcaggcagaaaagatggcgcaggaacaggttgcccgccaggtcgagatggctaaggttcgcaaccaaatgtaccacctgcttacgccagagcagcaagcggttttaaatgctaagcaccagcagcgtatggatcagttgcgtgaggttgcaaggatgcagaaaggctcagcgatgatgctttcgagtagtagcaacaccctgcaaccccagtaacaaaccctgttttccttgccatagacaccatccctgtcttcccccacatgatgtgggggttttttttgccctttttacggtaaatcaactccttcgcctatcccgtgagcgtcacaagttcgggttatactaagcgcattgcaggagaaggagcctatatgaatcaatcttatggccggttggtgagccgcgccgctatcgccgcgacggctatggcctccgcgttacttttgatcaaaatttttgcgtggtggtataccggttctgtcagtattctggctgcgctggtggattcgctggtggacattgccgcctcgctgaccaacctgctggtggttcgctattcgctacagcctgctgatgaagaacatacctttggtcatggcaaagcggagtcgctggcggcgctggcgcaaagcatgtttatctccggctcggcgctgttcctgtttctcaccggcattcagcacctggtgcgtccggagccgctgcaggccgccggcgtcggggtcgtcgtcacattgatcgccctcgttagtacgctggcgctggtgactttccagcgctgggtggtgcgaaaaacccagagccaggcggtgcgggcggatatgcttcattatcagtctgatgttatgatgaacggcgccattctggtggcgctgggcctctcctggtacggctggcatcgcgccgacgcgttgtttgccctggggattggcatctatattttatatagcgcgctgcggatgggctatgaggcggttcagtcactactcgaccgcgccttgcctgacgaggagcgtcaggacattatcaccatcgtgaccgcatggcccggcatccgcggggcgcacgatctacgaacgcggcagtcagggccgacccgctttattcagattcatttggaaatggaagataacctcccgctggtgcaagcccacgtgattgcagaccaggtggagcaggcgattctgcgccgtttcccggggtccgatgtcattatccatcaggatcccagctctgtggtgccagcggcgcagcagggcttttttgagcgttaggttatagtctgtaaactcgatgtaaaaatgtggggcagatcggcattttttgtataaattaccgccgtttggtctgacctgaatcaattcagcttgaggcgtttgatatactattgtcattagcgtcgtgcactcctggtgagggagcgcttcaggcaacagaattattttttgcttcctaagttcagaggtagtcatgattaagaaaatcggtgtgttgacaagtggcggtgatgcgccgggcatgaacgcagcaattcgtggcgttgtgcgcgcggcattaacggaaggtctggaagtttttggaatctatgacggttacctcggattgtatgaagaccgtatggttcagctcgaccgttacagcgtttccgacatgatcaaccgcggcggtaccttcctgggctccgctcgcttcccggaattccgcgaagaacacatccgcgctgtggctatcgaaaacatgaagaagcgcggcctggacgcgctggtggttatcggcggtgacggttcctatatgggggcgatgcgcctgaccgagatgggcttcccatgcatcggcctgccgggcactatcgacaacgatatcaaaggcactgactacaccatcggcttctttactgccctgagcaccgtggtggaagcgattgaccgtttgcgcgacacctcctcttcgcaccagcgtatctccgtggtggaagtgatgggccgttactgtggcgacctgaccctggcggcggcgattgccggcggctgtgagttcatcatggtgcctgaagtggaatatacccgtgacgatctggtggcagaaatcaaagccggtatcgcgaaagggaaaaaacacgctatcgtggccatcaccgagcacatgtgcgacgttgacgagctggcaagctatatcgagaaagagactggccgtgaaactcgcgccaccgtcctcggccacattcagcgcggcggttccccggttccttacgaccgcatcctggcttcccgcatgggcgcctatgcgattgagctgctgctgcagggccatggcggccgttgcgtcggcatccagaacgagaagctggtgcaccacgacatcatcgatgccatcgagaacatgaagcgtccgttcaagaacgactggctggattgcgcgaagaaactgtactaagttacgcgccggataaacaaaaggccttctcatggagaaggccttttttatggcggaaggtttattcgatatccagcgggtcttccgacaggatcatcccggtgttatcggcatacagatggtcgccggagaagaaagtcaccccgccgaaattgacgcgcacgtcgctttcgccgatgccttcgccagccgcgccgaccggaatagccgccagcgcctgaataccaatgtccagctcctcaaggtcgtcaacctggcgcaccgcgccatagaccaccaacccttcccattcattctggacggccagacgcgccaggtcagcgtcaattaacgcgcgtcgtactgagccgccgccatcgatcaggagaatatgaccacggccattctgctcgagcagatcgtagagcaacccgttatcctcgaaacatttaaccgtaatgatctgtccaccaaacgacgaccgtcctccaaagttagagaacagcggttccacgacgttgacatcttcctggtagatgtcacaaagctcggaagtatcgtatttcataggcttaacgttcagttgctgcgagagtttttagtatatcccgcgaatcgcattgttggcaaaatcatcaattgttaattgatatttgtcagttaagccatcagcttactggcaataattccgataacaaacagcaggttggtcagtaaggcccctttgaccgtcttttcgagcattggccgcatcgccagcggatcggattcgcgcaggacgtagcgcgcctgtttcaccagcagcggcgtggcgagaataaacagccagccccaggctgaatgcagcgccagcaggttaaacagcgccagacacagcagggcgccgagcagcaggcaggcatgatagcggcgggcattgaccgggcccaggcgcacggcgagggtgttcttcccgttctgccggtcgctgtcgatatcgcgcagattattgatgttcagcacggcggtcgccagcagaccgcaggctgtcgccggcagaaaaatggccgcttccacattatgggcttgcagataccagctgccgaggacgctcagccagccgaagaaaacgagtactgagatatcacccagaccaatatatccatacggacgggtgcccaccgtgtaggtgatggcggccacgatagacaggcctcccagggcgaggaagccgatgaaatcgccgacgctctgccaggcggcgcacagcagcgccaaaccaaacaggcagatgagtacgacggtgacgatcagggcgcgcttcatctgctggggggtaatcacccctttctgcatcccgcgcagcggcccgatgcgatccggtttatcgctccccttaaccgcgtcgccgtagtcattggcgaggttggaaagaatttgcagcaagccggcggtgatcagcgccagcagggcaacccagggatcaaaatggccctgctcccaggcaaggacggtgccaacaataatcgcggcaaatgccagcggtaacgttttaggacgcaggctttccagccacgcctgtgaacggctgatatcagtcatagttattctagccaataaaaatgggggcgatagcccccatcaacagtgatgaaaatgcattgcaccggattataggataaaacggctcagatcttcatctgccaccagaacatccaggtgtttactcacatattcggcatcgatagtgacggtctggccgttcatctcgctggcatcataggagatatcttccaccaggcgctccagcacggtgtgcaggcgacgcgcaccgatgttctcggtggtttcgtttacctgccatgcggcctgggcgatgcgcttgatgccgtcttcagtgaattcgatgttcaccccttcggtcgccatcagcgccttgtactgcacggtgatggaggcattcggctcggtcagaatacgttcgaaatcatgggtagtcagcgctttcagctcaacgcggatcggcagacggccctgcagttccgggatcaaatctgatgggctggcgacctggaacgcgccggaggcgataaacagaatgtgatcggttttcaccatcccgtgtttagtggagacggtgcagccttccaccagcggcagcaggtcgcgctgaacgccttcacgagacacatccgggccggaggcgttgccgccgcgcttacagattttgtcgatttcgtcgatgaacacgataccgtgctgttcaacggcgtcgatagcttcttgcttcagctcttccgggttaaccagcttcgccgcttcttcttcgataagcagcttcatcgcgtctttgattttcagcttacgcggtttctgtttctggccgcccaggttctggaacatggactgcagctggctggtcatctcttccatgcccggaggggacatgatttcaacgcccatcggcgccgcggcgagatcgatttcgatctctttgtcgtcaagctggccttcgcgcagtttcttgcggaatgcctggcgcgcagcggaaggttcctgcggctgttcagcctggccccagttgtttttcgccggcgggatcagcacgtcgaggatacgctcttcggccatttcttcggcgcgatagcggtttttatcgatggactgcatgcgtaccattttgatcgcagcgtcggtcagatcgcggatgatagagtccacttctttaccaacatagcccacttcggtgaacttggtcgcttcaactttgatgaacggcgcgttggccagtttcgccaggcgacgggcgatttcggttttacctacgccggtcgggcctatcatcagaatgtttttcggcgtgacttcatgacgcagctcttcattaagctgcatacggcgccagcggtttcgcagggcgatagaaacagaacgcttggcggcgtcctgaccgataatgtgtttgtccagttcgctgacaatttcgcgtggggtcatttcagacatgggagatccttacgctttagaaggtaattcttcgatggtgtggaaatggttggtatagatgcagatatcacctgcaatatccaacgctttctcggcgatgtcgcgcgcgcccatatcggtattttccaacagcgcgcgggccgcggcctgggcgtaaggaccgccggagccgatagcaatcaaatcgttttccggctgtaccacgtcaccgttaccggtgatgataagcgacgcgttttcgtccgcgacggccagcagcgcttccagtttgcgcaacatccggtcagttcgccagtctttggccagctcaacggcggccttcaccagatggccctggtgcatttccagtttacgttcaaacagttcgaacagcgtgaaggcgtcggcggtgccgccagcgaaaccggcaatcactttgtcgttgtacagacgacgcactttcttcacattgcccttcatcacggtgttgcccagcgtggcctggccatcaccggcaataacaacatggccgttacggcgaacacttacaattgtagtcacgagcagaccccttggttgcaaaagcggaacaggggccccgcgctgtccgcggggccgaatgcaattatagatgggggggattttgagggtttcaacccctggcggcgagacgaatgcagttcgcgtgtccagccatcttcaggcgggtgatcatctcgttggcgctttctttgcctttcaacgggccaataaccacgcggttccagccgttgttagtggtaatgtgcgaagcaaacccttcgaaagccagctgagcgcggacggtttcggcctgctcggcgcctttaaaggagccgcactggatcatccagctacgatcgtctttcttctcggcggtggttttcggcgcttcttccacccgagttaccggcgccgcggcctgggtacgcggctgcgtggtattggtatgcgctggcgtctgcagcagatcctggtacggctgctggtttgacgcggtctgcttcggctgttgctgctgaaccggcttcggctgctgaacgcgcggcggctgttgttggacggtctgcgcctgagtctgcgcccactgttgctgctgcgcctgctgctgttgctgcgctaaacgctgacgctgaagcgtctgctggcgctgcgccggcgtttgttcgttccacggcacttcggtcagctgggtcggctgctggcgcatatcggcctgcatctgggcgagcagctggcgctgctcgtcggtcagctgttccggtttcatgacttcgccaccggcggtcggttcggtcggcgcgcggacgccaggctggcggctttccagctctttaatatagcgccagcgctcttccggtttgggcggcaagccgttgccggcggcctggcgattttgcatcgcttccgcttcttctttcttatgatgcgtaatgaaatagaggccaccgataaaggccaccagcacagccgccgcgatcgccaccatcgccggtgaaatcgccggaaggctgctttgcttattccttgagcttcgggtcgtgctctttttgcgccgcgaagaagccggttggctgcggcgtacataatctcgttgtgccactatcgtttcgctgtcttatattcgttcgtcagcccgccatgttacttaagcggcgggcctttgaccagaagagcaggcccgaaagcctgatggttatcgtctgattttttgcgtactgccgcgaacaatcagttcgcaatcgagcagacgcgagccgctgttcacgttatgcccctgcatttgctccagtaatagcagcattccttcacggccgatatcaaaccgtggctgtgaaaccgtggtcaacggcggatcgcaaaattcagacaacgcgatgttatcgaagccgacaattgacaggtcgtccggcactttcagaccgcgacgttttgccagcgacaaagcgcccagcgccatcacatcgctatggcagaagacggcggtcggcggcaccggctgcgccaggagctgctccagcgcattggcgccggcttcgaaggtaaagttgccgcgagcaatatagtgcggatcgacggtgataccgctgcggcgcagcgcctgcacataaccctgcaggcgataatggcacaacggcatatcttccgggccggcgatacagccgatacgctgatgtcccagctcgtggagataatttaccgcgttaaaggccgccgtcaggttatcgatatggacggtgggcagctccagctccggcgcaaactcattcgacatgaccattggcggcaaattgcgctgctcttccacgctggcgtcaaacggcaagcgcgagctgagcagcaccataccgtcgatctgcttggtgataataaggtcgataaaggttttttctttctggttctggtgggcgcaatcgccgattaacaccagataaccgtgctcggcggccgtgacttcaattccgcggatgacttcactaaaaaagggatcgcagatatccggcacgatcacgaggatcgtccgcgattcgttgcgcttcatatttcgcccgagcgactgcggtaaatagccgacttccagcgccgcctgctcgacccggttacgggtggcttgcgacaccttatcagggttcatcaacgctcgggacacggttgccgtggaaacgtttgccttgagggcgacgtctttcatggtggcggcaaccacttgttttttgggcttcacctggtttctcctcgctgaatggcgctggcatttcccttgggcgctaactgctgcatcatttttatcagatagtcgcggcagtgagttacagaattttcatgaaaaacgtgatgcttgttaaatttttcgatccggctcgcaagagaaggcttatccttcaatcggatcgacatccagcacccacttcacttttctcgcctccggaagcgtattgatcagcgccagcgtaccgctaacgatatgttgcagacgcacccgcgaaggatgctgcagcaatatttgccagcgccagcggccgccgcgctttggcgccagcgccggaaccggaccgagcacccatagcttttcgtcggccagcgggctggcctgcagcagattgcgcagctgctgtaaaaacagcggcgcctgctggttgttatggtcttccgcacgaatcagcacatggctggtccacggcggcagctgcatcgtctgccgctctgccagcgcctgttcggcaaaggcgtcgtagcctttatacagcagggtctgcagtagagggtgttccggatggtgggtttgaagaatgacctcgccctgttttcctgcccggcccgctcgtccggagacctgggtataaagctgagcgaaacgctctgcggagcggaaatcagcggaaaacagcgccccgtcgacatccagcagggagacgagggtgacgtccgggaagtggtgccctttggctagcatttgggtgccaatcagaatacgcgccccgccgcgatggacggcggcgagatgctcctccagcgctcctttgcggctggtggtatcgcggtcgatacgcgagataggcacctcagggaacagcggcgccagggcctgctccagctgctcggtgccgatccctaccggcaccagatgcgtggagccgcaggaaggacactggcgcgggatcgggcgctggctgtcgcaatggtggcagcgcagatggtgctgcgcctggtgcaacgtatagtaactgtcgcagcgcgggcattccgctatccagccgcaatcgtggcacagcagcgctggcgcaaagccgcggcggttaagaaacaggatcacctggttatccgcttgcaggtgctggcgcatacggctaatcagcgcgggagacaggcccgcctgcagcggttgccctttgagatcgagcacgtgctgctgggccgggcgcgcattgcccgcgcgtttgcttaaggttaactggcggtatttaccctggcggacgttatgcagagtctccagcgccggcgtcgccgagccgagaattatcgggatctgctcgctgtgggcgcgccataccgccaggtcgcgggcatggtagcgccagccttcctgctgcttgtaggagctgtcatgctcttcgtcgatgacgatgacgccgagatctttaaatggggtaaacagcgaggagcgggtgccgatcacaatggccgcttcgccatttttcgccttcagccaggccgagagacgttcgctgtcattgagcccggagtgcagcacttccaccggcgcgttaaagcgctggcgaaatcgggcgatggtttgcggcgtcaggccgatctccggcaccatcaccagcgcctggcgcccctgcgccagcacattctccagcacgctcaaatagacttccgttttcccggagccggtaatacccgccagcagccaggcggagaaacgatcggcggcgctgtggatcgccccgacggcggtggcctgctcggtattcaggcgcaggcgttcgccggcaaccgaatacgcgctgcgccagtcggtgagggcgggcgcttcgcaggccagctccgccagccctttgccgcgcagcgcctgcagcgccgcttcattgaattccagttcgccaacctgatgacgccagattttgccctggcgcagcgccgccagcgcctgctgctgcttccgggagcgtttcagaccgttaaggtcgacaacctgcccctgctcggtggcgaaccagtaccacagcggcgtggcgctggcgggtttgccctggcgcagcataacgggtaatgcatggaacagcacatcgccgatcgggtgatggtaatactcagccgcccacatcagcagtcgccagacagtcgtggagaagaccggctcgtcgtccagcgcttcggcgaccggttttagctcatccagcggcagttcgctgcgctcgctcaccgccgcgacaatgccgatccgctcctgtttgccgaacggcacccgcacccgacagcccgctttgaccgccatgccttcaggcagcaggtagtcaaaagtgcgcggtagcggaacgggtagggcaacgtgggcgacggacatgtcatcttcctgacttgaaatctggcgggatagtatacacattacgataaggcggcgcggatcagtttgcatatgctggtcaaattctgtatgattcgccgcctttgatgcgctttatatcgcattgaagattgaccattaccgcgtgcttcacgctgtcagcagcgtagaaggcgacgggaaattactaatatcgcgtggtgtctggcgttagggctggaagagcgacgcggccttaactgaggttctcccatgaaaaaaggtattcacccaaattacgacgaaattactgctacctgttcttgcggtaatgtcatgaaaatccgctccaccgttggtcacgacctgaacctcgacgtgtgcggcaaatgccacccgttcttcaccggcaaacagcgtgatgttgctaccggtggccgtgttgaccgcttcaacaagcgcttcagcatcccgggcagcaagtaagttgccagaagaagccgcctcagggcggcttttttgtctcttccgcctgcctgggcgggaaagaaaaaagggcggaagattattccgccctttttatcgtctcagtattcccacgtatccgggtcgattcccagttcacgcataatcgctttcgccgcttccgggatctcatcgctgcgctctttacgcaggtcttcatcgttaggcaacggttgtccggtaaaggcatgcagaaacgcttcgcacagcagctcgctgttggtcgcgtgacgcaggttattcacctgacgacgcgtgcgttcatcggtgaggatttttaacaccttcagaggaatggaaaccgtaattttctttacttgttcactcttcttaccgtgctcagcgtatgggctgatatattcgccgctccattcagccatgagataccttaatcctctgtttattagtgaagggccagaatattccgcccgggctataattgcgcgtagtttaccgtatgcgcgggctttctgacatgagataagccgccgacgacgtgcgctaatgcatataattttaacggctatttgcactttgctcaatctatacgcaaagaagtttagatgtccagatgtattgacgtctattgtgacaatgattactctggagcctgacttttcaccgattcagcccaggaacttcccaacatgacgcgtaaacaggccaccatcgcagtgcgtagcggtttaaatgacgacgagcagtacggttgcgttgtcccgccgattcacctctccagtacctataacttcaccggctttaatgaaccgcgcgcccacgactactcccgtcgtggcaatccgacgcgcgatgtggtgcagcgcgccttagcggagctggagggcggcgccggcgcggtgctgaccaataccggaatgtcggcgatcctgctggtgacgacagtgttccttaaaccgggcgatctgctggtggcgccgcacgactgctacggcggcagctaccgtctgttcgacagcctggcgaagcgcggctgctatcgcgtccagtttgtcgatcaaagcgatgagcaggcgctgcgggcggcgctggcggaaaaaccgaagctggtgttggtggaaagcccaagtaatccattgctgcgggtggtggatattgcgaaaatctgtggtctggcgcgtgaggccggggcaattagcgtggtggacaacaccttcctgagcccggcgttgcaaaacccgctggcgctgggcgccgatctggtgctgcattcctgtaccaaatacctcaatggtcactccgatgtggtggccggggtggtgattgccaaagatccggcaactgtcaccgaactggcatggtgggcgaataatattggcgtcaccggcagcgccttcgacagctatctgctgttgcgcgggctgcggacgctgtctccacggatggaagtggcgcagcgaaatgccctggcgatcgttgagtatctgaaaacccagccgctggtgaaaaagctgtatcatccatcgctgccggaaaaccaggggcatgaaattgcggcgcgtcagcaaaaaggttttggcgcaatgttaagcttcgagcttgacggtgacgagcagacgctgcgccgttttctgagcgggctgtcgctgtttacactggcggaatcgctggggggcgttgaaagcctgatttcccatgcggcaacgatgacgcatgccggcatggcgcctgaagcgcgtgccgccgccggaatttcagaaacgctcctgcgtatatcgaccggtattgaagatggtgaagatttaattgccgacctggaaaatggcttccgggcagcaaacgaggaataaagatgagtgtgattgcgcaggcaggggcgaagggtcgtcagctgcacaaatttggtgggagtagtttagcggatgcgaaatgttacctgcgcgtcgcggggatcatgaaggagtattcgcaggcgggggatatgatggtcgtctccgccgctggcagcaccaccaaccagctgatcagctggcttaagcttagccagagcgatcgccttgctgcgcatcaggttcagcagtcgcttcgccgctatcacaccgagctgattggcggtctgctggagcctgcggcggcggatacgttgatagccgcctttatccacgaccttgagcgtctggctggtctgctggacggcggggtttccgaagcggtctatgcggaagtggtcggccatggggaagtgtggtccgcgcgcctgatggcggcggttctcaaccagctgggtatggaagccgcctggctggacgcgcgcgcgttcctgcgcgcggaacgcgccgcgcagccgcaggtggatgagggattatcttacccactgctgcagcagctgatggcgcagcatcctaacaaacgtctggtggtgaccggctttatctcccgcaaccaggccggcgaaaccgtcctgctgggccgtaacgggtctgactactctgccacccagatcggcgcgctggcgggcgcctcccgggtcactatctggagcgacgttgccggggtgtacagcgcggatccgcgcaaggtgaaagacgcctgcctgctgccgctgctgcgtctggacgaagccagcgagctggcgcgcctggccgcgccggtgctccatgcccgcacgctacagccggtttccgccagtgatatcgatctgcagttacgctgcagctacacgccggaacagggttccacgcgcattgagcgcgtgctggcctccggtaccggcgcacggattgtcaccagccatgacgacgtctgcctggtggagttccaggtgccggccggtcacgatttcaaactggcgcataaagagctggacgctctgctcaaacgcgcccagctgcgcccgttagccgttggcgtccatgccgaccgtaagctgctgcagttctgctatacctccgaggtggccgacagcgcgctgaaattgctcgatgaagccggtctgccgggcgagctgcgtctgcgtcagaagctggcgctggtggcgatggtgggcgcgggagtcacccgtaacccgctgcactgccaccgtttctggcagcagctcaaagggcagccggtggagttcacctggcagtctgaagaggggatcagcctggtggcggtgctacgcgccgggccgacggaaagcctgatccaggggctgcatcagtccttgtttcgcgccgaaaagcgtattggcctgatgctgttcggcaaagggaatattggttcccgctggctggagcttttcgcccgtgaacaaactacgctctcggcgcgtaccggtttcgagtttattctcgccggcgtagtcgacagtaaacgcagcctgctgaattacgacgggctggatgccagccgggcgctggctttcttcaacgatgaagcggtggagcaggatgaagagtcgctgttcctgtggatgcgcgcgcacccgtatgatgatttagtggtgctggacgtcaccgccagcgaacagctggccgaccagtatcttgatttcgccagccatggcttccacgtcattagcgccaacaagctggcgggcgccagcagcagtgataaatatcgtcagatccacgacgcgtttgagaagacggggcgccactggttgtataacgccaccgtgggcgccggcttgccggtgaaccatacggtgcgcgacctgatcgacagcggcgatactattctcggcctgagcggtatcttctcgggaacgctctcctggctgttcctgcagtttgatggcaccgtgccgttcaccgacctggtggatcaggcgtggcagcaggggctgaccgagccggatccgcgcgtcgatctgtccggtaaggatgtgatgcgtaagctggtgatcctcgcgcgggaagcgggctatgacatcgaaccggatcaggtgcgtgtggaatcactggtgccggcgcactgtgaagaggggtcggtcgatcacttctttgagaatggcgaagagctgaacgagcagatgctgcagcgtctggaagcggcccgcgagatggggctggtgctccgctacgtggcgcgctttgatgccaacggcaaagcacgcgtcggtgtggaagcggtacgcgaagagcacccgctggcggcgctgctgccgtgcgataacgtgtttgccatcgaaagccgctggtatcgcgataacccgctggtgatccgcgggcccggcgccgggcgcgatgtgaccgccggggcgatccagtcggatattaaccgcctggcgcagctgctgtaagcgtcgcgttatactcttgaaccagtgaggccactatttgcgttacgcgccctgcggaatacagggcgctctgcgcaaacgcgggtctgtttttcagccatattgtaaaccgtcggctggccgcaaggtctggtagaaaggcgttctcttctacagtgccggcaagccggcagaccattttctgattctcttcctgcgtccaacgctgccatgaattttgccaccagccatgatgggttttccccagtagctgccacggagccgggctggctgggttccttatctcttcttccacataccatagatcgccttgccgctgacgaaaaagcggcgcccaggcaacgatcgccgcgccgcgtaaaaagcattcatgcgcaataacgtgcgttttcacctctggaaaccgctggctgagcagtttgaaatgaccgtgcgcggcgataaccgggcgcaatatattgccgcgggcatggcgcttttgcattgcgctgccgtactggatttcatcgaactgactgcgttgtaaaaagcgcatttcagtgagagaaatacgttgaataatatcgtcagtctcctccctgtcggcttgtccgccgcgccagcgatagcgtaatgattcgcctaccgcgaaaggagtgaaattagaggtaagatgaataacattaccgcgcacggcatcaaagcttaataaaaaatagagcttttgcccggcggcattaccctggaatggcgctatcaacggtacgctgcaaatacgtcgtggggcttcaattggggcgatgtgtgggaattttggcgtccagacctttttacagtggcggcactgaaggcgttgcgtaccctgcggattgcggccgtagcgaataatatcccgctgatagcataccgggcaaaaatagccgtagcggcgggcatgatccgtcagataagccgccagccaggggcggaattcccgttcgttaaacagggggggatagctgccgcaggctgcgcagtagagcgccgggtagcccagccgaaaattcgggaaatgatactcagccgcagacggtaaacctaaattgcggcagccaaaagttttacaggcgttaatggtaaagagagtatccactggcaggtcaataccaacgatttttacaggtcgttaattttgtcctgctcaggttgcatacaactgtgaatgctctcacataaaaaagtctttcagaacgtaacttagcggttctttatcactctgaaaggaactccgatgaaactaaaagcaatgagcgcagcacttctgttgactttgcctttctgggcctgcgccaaagatgtcaccataatttataccaacgatcttcatgcccatgtcgaaccttataaagtgccatggatagcggatggtaaacgagatattggtggttgggcgaatatcacgacgatggtgaaacaggaaaaagcgaaaaataacgcgacctggttttttgatgccggggattattttaccgggccttacatcagtagcctgacgaagggcaaagcgataatcgatattatgaatacgatgtcctacgatgcggtgactatcggtaatcatgagttcgatcacggctgggataatacgttgcttcagcttagccaggcgacattcccgattgttcagggcaatattttttatcagaacagcgataaatcgttctgggataagccctataccattatcgaaaaagatggcgtgaaaattggcgtgattggcctgcacggcgtgtttgcttttaatgacaccgtttctgccgcgacgcgagtgggtatcgaagcgcgcgatgaggtgaaatggctacagcattatatcgatgaacttaacggtaaagtggatctgaccgtggccctgatccatgaaggcgtcccggcgcgtcagtcgagccaggggggaaccgatgtgcgtcgtgcgctggataaagatattcagactgcgggtcaggtgaaaggcctggacgttttaattaccggccatgctcacgttggcacaccggagcccattaaagtgggtaatacgttgatcctttctaccgatagcggcggcatcgatgtgggtaaactggtgctggattatcaggagaaaccgcaccaattcacggtgaagcactttgagctgaagacgctttatgccgatgagtggaagcctgatccgcagacaaaacaggtcatcgacggctggaataagcaacttgaacaactggtgcagcaggtcattacacaatcgcccgttgaactgacccgtgcgtatggcatctcttcgccgttgggcaatcttgccgctgacgccttgctgttggcagcaggtaggagtacgcagatggcgttaaccaactcgggcgggatccggaatgagatccccgccggggcggtgagcatgggcgccgttatcagcaccttcccgtttcccaacgagctggtcaccatggatctaaccgggaagcagttgcgtagcctgatggagcatggcgccgggttgagcaacggcgtgctgcaggtctcccggggactggaaatgaagtatgacagcagcaaacctgtgggccagcgcgttgtgttattcaggctaaacggtaaaccgattgacgatacgacggtttaccatattgccaccaacagcttccttgcagatggcggcgatggttttgtcgcgtttaccgaggggcaggcgcgtaatacctccggcggctattacgtttcaaatgcggtcgtagactatttcaaagccgggcaaaagataacggatgagcagcttaacgggcagcgcgttgtcgatgtgaagaaataagtttttaaggccgggcagtcagcccggccttaagcgatcagtgggccgcaaataccgccctggcggcaaacaggccgttgagggccgccgggaatccggcatagactgccatctgcatgatcgcttccgtaatctcctcttgcgtcaggccgacgtttaatcctgcggcaatgtgtactttcagctgtggctcggcgttacccaacgccgtgagcgcggcgatggtggcgatttcccggctgcgtaaatcgagccctggcctggcgtaaatatcgccgaaggggaactcaatcagatagcgggcgaaatcgggggcgatatcccgcaggctgtcgacgacagcttccccgcccttaccatccacccgctgaagcatttcctgaccgatgatataacgttcgctggacatcgttttttcctctctgtgatggtgcgttaagaggaagggtagggaagtgtgccggacttgagtaatacccttttcgtgataccttttcagtatgacaacttcaagattacattctctggatattcgcctgctgcgcgcctttgccgtggtagcggaggaaaataacatcagccgggcggcgcagcggttatttatctcgcagccgccgctgacccgccatatccgccatctggaagcgcagctgggggtgacgctgtttcagcgccatagcaaaggcctgatcctgaccgacgcgggtagagaggtgctggagatgattcaacctctgctggcgctccaggaacgcacgctggcggcattgagtgagctcgccgcccactcgccgcaggctctacgtctgggcgtgacgacggccttcgaacagggcattttcgccgccgttgaggctgcgctgagcgaacatacccgcgcgttgcatatcacccgccacgcctcaccggcgctggctcagcaggtacgcaaaggcaaactcgatgcggcgctggtcgcgttgccgctcaatactgaagggctgcacctgcacccattgccgtatcatgagccgctcattgcggcattaccggcctcctggccggaagccgccaggccagagctgacgttaagcgcgctcaatcatcggccgctgttctggtttaaacgcgagcgtaatcctggtttctttgactacacgcgccgcattttcgaccgggctggctatgtcccgacgtatgtggaagagccggccgagcatgatgtgctgctggcgcgtattgcgcgcggggaaggcatgatcctgctgccggcgtccttttccgcgattcagcgtcagggggtggcgttctgcccggtggctgagggcgacgcgatgccgttaagccttggggtgatttatccgcctcaccaggcagagtccgtgcagcaatggctttctctgctggatggcattctggcgactggctagtctcaggctgactcgcgagccaccttatattgcccaccgagccgcttcctgtgcgtggccaggtgatcggaagatgaacttttttcatgtaggtgacctattcctcactctttacgcagatttttctattgacgcccgcgcgcttttccgtcatttttacatctggacgtctaaacgtatagaagttcgcaatataacagccattacatgcgattgatgaggtaaggtatgagcttttttcacgccaatcagcgggaagccctgaatcagagcctggcggaagtccagggccagattaatgtgtcttttgaattctttccgccgcgcaccagtgaaatggagcaaaccctgtggaaatccatcgatcgcctgagcagtctgaaaccgaagtttgtttcggtaacctatggcgcgaactctggcgagcgcgatcgcacccacagcatcatcaaaggcattaaagagcgaaccggtctggaagcagcgccgcacctgacctgtatcgatgccagccgcgatgagttgcgcactatcgctcaggattactggaacaacggtatccgccatatcgtcgccctgcgcggcgacctgccgccgggcagcggtaaaccggatatgtacgccgccgatctggtgacgttgctgaaagaggtaggcgattttgatatctctgtcgccgcgtatccggaagtgcatccggaggcgaaaagcgcgcaggcggatttactgaacctgaagcgcaaagtagaagcaggggccaaccgcgcgatcacccagttcttcttcgatgtggaaagctacctgcgttttcgcgatcgctgcgtctcggcaggcatcgacgtggaaatcattcccggtatcctgccggtctccaactttaaacaggcgaaaaagtttgcggatatgaccaacgtccgtatcccggtgtggatgtcaaaaatgttcgaagggctggataacgacgccgaaacccgtcaactggtgggggcgaatatcgccatggacatggtgaagatcttaagccgggaaggggtcaaggatttccacttctacaccctgaaccgcgccgagatgagctacgccatctgccatacgctgggcgtacgcccggcctgagttttcattaacgtttagtgcgatggcgaagccggtattcgccatcgcttttttttgcccaaaacgctgatacaggtcaggggagagcagaagataaagcgcgtatagtgccagcctgataattgacagggatgggttatgcaatggcaaggaagagcgatccactggcgtttggcggtttggcgttattaacgctgatctggagctttagctggatcgcgatgaagcaagtgacgagctatatcggcgcttttgacttcacggcgctgcgctgtatttttggcgccgtggtgcaatggatagtgatgttgatccgcggtaaagcgctcaagccgacgcctttcggctacaccctggcgatcgcgttattgcaaacctgtggcatggtcggtctggcacagtgggcgctaatgagcggtggcgccggtaaagtggcgatcctgagttataccatgccattctgggtagtggtgatggccgcgttattcttaggtgagcgcatgcggcgatggcagtatatcgccatcggggtggcatgcgtgggcctgatactcgtacttcagccttggcaactcgactttacctccctgaaaagcgccttgctggcgatcctctccggcgtgagctggggggcaggtgcgatcgtcgcgaagcgtatgtatacccggtatccgcaggttgatttgctggcgctaacgacatggcagatgctatatgccgccgtagtaatgagcgtagtggcctggctcgtcccgcaacaggcggtagactggcagcccgacgttttctgggccctggcttacagcgcaatccttgcaacggcgctggcctggagtctgtggctttttgtactgcgtaatttaccggcaagtatagccggtctgagtacgctggccgtaccggtctgtggcgtgctattttcctggtggctactacatgaaaatccaggaaaggtggaaggttgtggcattgcgttgatagtactggcgttggcgatgatcagtatcaagagacgaggggcatagcctgctccggcctgcagagatgcataaaaaacacccggctgtcgccgggtgttttgctctggtttattcccattcctgcaggaagcgctgaccatactggtcggccaccagcagcgcggcgtagacctggtcggaatcaacgccgcccggcatattgtgaatggtttcgccttcagcgcaggcggcttccgccaccagacgcattttggtcgggatatcacctttgatatccagctgcgccagggtgatcggcagcccaacgctgtggcacagcgcggcgacggtctctatttcgtccaccggcgcattttccagcaccagctgcgtcagggttccgaacgccactttttccccgtgataatagtgatgggcgtcagggatggccgtcatgccgttatgaatcgcgtgcgccgccgcgagaccaccgctttcgaaacccacgccgctcagataggtgttggcttccaccacccgctccagcgccggggtgaccacgtgctgttcggcggccagcatcgctttttcaccctcttcgagtaaggtgttgtagcatagctcggccagcgccagcgcggcctgggtgcacttcccgcccgccatggtggtggcgccgctacgggagcaggcgcgggcttcgaaccaggtagccagcgcatcgccaatcccggcggccagcaggcgggccggcgcgccggcaacgatctgcgtatcgacaatgaccatgttggggttgcgcggcagcatcaggtagctgtcgaattccccttcgtcggtgtatatcaccgacagcgcgctgcacggcgcatcggtggaggcgatggtgggggcgatcgccaccggcacattcataaagtgggccagcgctttcgcggtatccagggttttgccaccgccgatccccagcacggcggtgcacttcgcgttgccggcgatatcgcgtaggcggttgatttcattatgcgaacactcaccgccaaacggcgcgatttcagccgccaggccagcgtcggccaggcttttacgcagcatctcttccgcaaaccccaggacgaacttatcaccgaccaccagccagcgctcggccagcggtttcagatagtcgccgaggcgcttgatggcgcctgtgccctggatatatttgcctggtgattgaataatgcgatccatttcgattcctcctcgatgaccgtgacgccgcccgcaggcggctcgcggatccggttacagattcagcgcgccaaaggcgttattccagtcctgttcaaacttctctatggctgactctaccgcaggggtgccgagcatttgttgcgctacatctagtggaagggtgattgcttcgcagccagccagcagacaatccagcgcctggcgtggcgttttgaagcttgccgccagaactttgctctcgggcgcatgcatttccagcagggattgcagctcctgcaccatgcggatgccgtccccgccctgggcgtcgacgcggttaacgtaaggcgcgacgtactttgcgccggccagcgcggccagcaggccttgcgaagcgctgtagacggcggtgccaagggtcgggatgccttctttcttcagcagtttgatagcggcgagcccttcggcggtgaccgggattttgaccacaatgcccggcacggcattgctcagacgtttggcctcttccaccatgccctgcgcgtcgcggctcatggtctgcgcgaagagggtgccctccggaccgacggctttttgcaggcgcggcagcacatcccagaccgggactttaccggcggcgataatgctcgggttggtggttaccccggccagcgggtagatgcgggccaggcgttccacttcggcgacgttggcggtatccagatagagttccattgtgttttcctcaatgcttaattcggtgctgtcgttgaggtaagcatacggctttcgttcgaaggatcgccagatgacaaatttgccaaaaactggataaatgtacgcatcgtgattaaggatgatttagatcacatttatcggcgctggctgggatgggaggtaactatagcgcgcacaaaagtcaggtttaacacacaaaaatctagttttttaccggggatgctttttccgtcagctggctatggtactggcggcggtattcagacggcgagcgttccgtagttttgcggaacaggcggcagaagtagttgctgtcggcgaagccgcaggcgtgggcgatgtctttcactttcatatcgtggcccttcagcagcatacgggcctgttcgagacgaatatggtttagatattcattgaagcccattggcccacatttctggaacagatgggaaagatagttgggagagaggtagaacgcctgggccaccgattcccggctcagcggttccgcataatggatgtccatatattggcggatcgcttcgaacaacgcctggctgcgcgaggaggtttgcgcctggctgccgagaagatcatggcagtggctgagcaggctgacgacgatgctgcgggcggtttgctgctcctgcggttgcatccggagttcattgagcgcctgcagcagaaatgatccgacgcgcggcccgcggcgcagcgcctgccgcttgtcgacaacagttatcgccttgccattccagtgctgcagcgagcactccagctgctgcttagcgaacaggatgcttaacagcaggcagggcgcttgccactgcgggcagttccagctatcgccagggatatagagcacgtcatgggcctcaaggagcggggcgttatcgccgagcgcctggtcgggcaactgcccatcaaggagaatattcagacggggaaaatccacctgcaccaccggctcagcaggcgagcgcgtctcgccggcgaaataaacccggccgaggctggtctgcttttttagcaatgcatcaataagttgattgatatcgttgtccatcattcttccgttcagcgcatcacccttttcatcataccggacattattccagcggtaaaagcgcttgcctgtcgctcttgcctcccagataagatatgttatatcgtaacaatttgtcgccattgatagcaaactcaggagagagtaatgaccagaaagatccccctgctggccttaggattcggcatggctttagccagcgcccaggcgttcgcccacggcaaccatagccatggcccggcgttaaccgaagtggagcgtcaggccagcgaaggcatttttgcggataaagatgtgcaggaccgcgcgctgagcgactgggaaggcgtctggcagtcggtgaacccgtatctgctcaatggcgacctcgatccggtgctggagcagaaggcgaaaaagcccggcggcaagagcgtggaggagtatcgcgcctattataagaagggctacgccaccgatgtggagcagattggcattgaagatgacgtgattgagttccacgttggccagaccgtcaatagctgcaaataccgctattcaggctataaaattctgcattacgcctccggtaagaagggcgtgcgttatctgttcgagtgccagcagggcgatgccaacgcgccgaaatttgtgcaattcagcgaccatatcattggcccgcgtaaatcacagcatttccatattttcatgggcaatgaatcacaggaggcgttgctgaaagagatggataactggccgacctattatccgtatgcgctgcataaagaacagatcgttgatgagatgctgcaccactagaacgggcggaaaacccccggccgggcggccggggggagatagattaaccggtgttacgcataccggcggcgacgccggcgatggtgaccatcagcgcttgttcaacgcgcggatccgggtccttgccctcttcttcagcctggcgtgaacggtgcagcagttccgcctgcaggacgttcagcgggtcggtatagatattacgcagctggatagactcggcgatccacggcaggtcggccatcagatgggagtcgttggcgatggccagcacgacgttgatatcggcagccagcagcttgcgcagctcggaacccagcgcccacagctccggcttcaccaggcgctgatcgtagtactccgccagccacaggtcggccttcgagtaaaccatctccagcatgccgaggcgggtagagaagaacggccagtcgcgacacatggcttccagttcactctgttttccaccttcgaccaccttctgcagcgcagcgccagcgcccagccaggccggcagcatcaggcggttctgggtccaggcgaagatccacggaatggcgcgcagcgactcgacgccgccggttggacgacgttttgccggacgcgaacccagcggcagtttgcccagctcctgctccggggtcgcagagcggaagtaagggacgaaatctttgttttcacgcacgtagccgcgatacatcttgcacgacacgtcggacagctcggccatgatgtcgcgccattctgctttcggctccggcggcggcagcaggttggcttccagaatggcgctggtatacagcgacaggctgctgatggtgacttccggcaggccgtacttaaagcggatcatctcgccctgctcggtaacgcgcaggccgcctttcaggcttcccggcggctgcgagagcagcgcggcgtgggccggcgcgccgccgcggccgatagagccgccgcgaccgtggaacagcgtcagttcaataccggctttttcgcaggttttgatcagcgcgtcctgcgcctggtactgcgcccaggaggcggccatcacgccggcatctttagcggagtcagagtagccgatcatgaccatctgcttgccctggataaagccgcggtaccagtcgatattcagcagctgggtcatgacgtcgttggcgttgttgaggtcatccagcgtttcgaacagcggggccaccggcagagcaaagccaatcccggcttctttcagcaggagatgaaccgccagcacatcggacggcgttttcgccatcgagatcacgtaggcggcgatcgatccgcgcggcgcctcggcgatcaccttgcaggtgtcgagaacttcacgcgtctcttcgcttggctcccactggcgcggcagcagcggacgtttggaattcagttcgcggatcaggaaagcctgtttgtcggcttccgaccagctttcgtagtcgccgatcccgaggtaacgggtcatttcacccagcgcttcggtatggcgggtgctttcctgacgaatatcaatacgcaccagcggtacgccgaaagacttcacgcggcgcagggtgtcgagcagttcgccgttggcgataatgcccatgccgcaggcctgcagcgatttatagcaggcgtacagcggctcccacagctgctcgttctgagtgatcagtcccgccggtttcggcagcttctgacctttcagacgcgcttccagccaggcctgggtctccatcagctgagagcgcagttttttcatcagataacggtaaggttcctgagcgccctcggcgccagccagggcgcgcagctcgtcggtacactccaccatcgacagctcggagatcagcacctgcacgtctttgaggaacaggtcggtcgctttccagcggctgagcagcagcacgtggcgggtgatgtcggcagtcacgttcgggttgccgtcgcggtcgccgcccatccacgaggtgaaacgcaccgggacgaagtccaccggcagctgatagccaaggttggcttccagctgttcgttcagctcgcgcagatagttaggcaccccttcccacaggctgttttccaccaccgcgaagccccatttggcttcatcgaccggggaagggcggtgcttacgaatttcatcggtatgccacgactgggcgatcagctggcgcagacggcgcatcagctgatggtgctcatagtcagcgatatctttgttgtccaactgcttaaggcagttgttcacttccaccattttatggatcagcgtccggcgggtgatctcggtcgggtgggcggttaacaccagctccagagacagcgattccaccgcttgtttgatggtctcttcgttgagattgggttggtctttgagctttctcagggtacgcgcaatgacttccggattgctggccgcttcgccattggccgaaatgctgtggtactgctcagcggtgttggccagattcagaaactggctgaaggcacgggccaccggcagcagttcgtcgtttgacaaattctgcagcgtggtcagcagctcctggcggttagcttcgttgccggcgcgtgaagatttggacaacttacggatagtttcgacacgatcaagaatattttctcccaatgcatccttgatggtatcgcccagcaccttgccgagcatactgacattactacgcaatgcggaatattgttcgttcatgttaccccagacaccccatctcattttattttgttatatccgctgcgctggaacgtgagcaacggataagcaacccgtcttttataaagccacgtaaatacccccacgtcaattactgcgaaatcgcttcagcaaacgagtaaatcgccgtaatttgcgaaatttaattcagggagcgctggataagtatcgcttatggaaatgtgacgatcgtcaccgttccgccccgggagaacggggcggaaaaagagggcgattttagtgccagcagaagtgatgaaccacctggctaatcagctcccgggtcggcttgataaagcgcgtctccagatactcgtcaggctgatgggcctgattgatggagcccgggccgagaaccagcgtcggacacagcgtctggataaacggcgcttcggtgcagtaattcaccacgtcggtctgcgcgccaagcagtttctcgaccacctgcaccagcttatggtccggcgggcactcgtagccggggatcggcggatgcagctcagagaccgtcaggcggcccggccagcgttcgctgaccggggccagcgcctcgcccaacagaccattaagatcgtttagggtcatccccggcagcgggcggatatccatatgcagttcacagcaggcgcagatacggtttgaggcatcgccgccatggatagcgcccaggttgagggttgggtaagggaccgtaaacgcctcgaagtgatagcgctctttaagcagatcgcgcaactgcataatccggccgatggcgtcgtgcatcagctcaatcgcgttgaccccgcgcgccggatcgctggagtggccggactggccctgaatacggatcgcgttggacatatggcctttgtgggcgcggatcggctgcagggaggtgggctcgccgatgatggcgcagtccgggcgcagccgggtggtttcggcaaagtagcgcgcgccggtcatgctggtctcttcgtcggcagtggccagaatatacagcggctttttcagcgtggtgacgtcgacatcgcgcagggcgtcgagaataaaggcgaagaagcctttcatatcggccgtgccgagaccgtagagcttgttatcgtgttcggtgagggtgaacgggtcgcgcgtccagcggccatcatcgaacggcacggtatcggtatgcccggcgagcagcaggccgccggcgccgtgtccggtgctggccagcaggttgaatttatggcgcgtatccggcaccggctgtatctcaacattgaagccgagatcgcggaaccagcctgccagcaaattgattaaagactcattgctttgatcgagagcctcttcagtcgcgctgatggatggtgtggcgatcaacgcgcggtaaatctcgataaagggcggtaaattgtttttcattgttgacacaccttgggtcgtgatagtatcaatattcatgcatttattttgaataaaaatacaatatcgttgagcgtaagaaaacccatcgaatgtaaggagatgcgcttccaatgttaaatacgctgattgtgggtgccagtggttatgccggcgcagagctggtgacctatatcaatcgtcatccgcatatgaacataaccgctttgacggtctccgcgcaaagcaatgatgcggggaaattaatttccgacctgcatccgcagctcaaaggcattgtcgatatgccgctgcagccgatgtccgatatcagcgaattcagcgctggcgtggacgtggtgtttctcgccaccgcgcacgaagtgagtcacgatctggcgccgcagttccttgccgctggctgcgtggtgttcgatctctccggtgccttccgcgttaacgatggggcgttctacgaaaaatattacggtttcactcatcagcatcccgacctgctcaaacaggcggtgtatggtctggcggagtggagcgcggatgcgcttaaagacgcgcagttaatcgcagtgccaggctgctatccgacggcggcgcagctgtcgctgaagccgctgattgaggccaatctgctggatctcaaccagtggccggtaatcaacgctaccagcggggtgagcggcgcgggtcgtaaagccgcgatcggcaacagcttctgtgaagttagcctgcagccgtacggcatatttaaccatcgccatcagccggagattgccagccacctcggggcaaaggtaatttttaccccgcacctgggtaattttaagcgcggcatcctggaaaccattacctgccgcctgaagccgggcgtcggccatgcgcagatcgcggcggtttaccagcaggcttacgccgataaaccactggtacgtttatatgataaaggcgtgcccgctttgaaaaacgtcgaaggcctgccattctgtgatatcggttttgccgtgcaggacgatcatctcatcgtcgtcgcggcagaggataacctgctgaaaggcgccgcagcgcaggcggtgcagtgcgcgaatattcgtttcggcttcgctgagacgcagtctcttatttaaggtgtgatgatgaacccattaattatcaaacttggcggcgtattactcgatagcgaagaagcgctggagcgcctgtttaccgcgctggttaactaccgtgaagcgcaccagcgtccgctgattatcgtccacggcggcggctgcgtggtggatgagctgatgaagcagctcaacctgccggtgcagaagaaaaatggcctgcgcgttacgccggctgagcaaatcgacatcatcaccggcgcgctggcgggaaccgccaacaagacgctgctggcgtgggcgaaaaaacatggtatttcctcggtaggcctgttcctcggcgatggcgatagcgtgaaggtgacgcagctggatgctgagctgggccatgtcgggctggcgcagccgggttccccgacgctgatcaacaccctgttggccggcggttacctgccggtggtgagctctatcggggtgaccgatgaaggccagctgatgaacgtcaacgctgaccaggcggcgacagcgctggcggccaccctgggggcggatctgatcctgttgtctgacgttagcggtatcctcgacggtaaagggcagcgcattgccgagatgaccgccgagaaagcggagcagctgatcgagcaggggattatcaccgacggcatgattgttaaagtgaatgcggcccttgacgccgcacgtgccctgggccgtccggtggatatcgcctcctggcgtcacgccgagcagctgccggcgttatttaacggcacgccgatcggcacacgtattctggcttaagatttcatgcccggcggcgcgtcgtctgccgggcttacaagaccgtaggccgagcggcacaatgccgccggcggaactaacgaataaaggaagcatgttatggcactttggggcgggcgttttacacaggcagcagatcaacggttcaaacagttcaacgactcgttgcgcttcgactatcgtctggcggagcaggatatcgttggctctgtcgcctggtcgaaagcgctggtaacggtcggcgttctgagtgccgctgaacagcagcagctggaagaagcgctgaacgtgctgctggaagaggtgcgcgccaatccgcagcaaatcctcgccagcgatgccgaagatattcacagctgggtggaaggcaagctgatcgataaagtgggccagctgggcaagaaactgcacaccgggcgcagccgtaacgaccaggtcgccaccgatcttaaactgtggtgcaaagataccgttgtcgaactgctctcggcgaaccgccagctgcagagcgcgctggtggagaccgcccagcagaatcaggacgcggtaatgccggggtacacccacctgcagcgcgcccagccggtgaccttcgcgcactggtgtctggcctacgttgaaatgctggcgcgtgacgaaagccgtctgcaggacgcgctgaagcgcctcgacgtcagcccgctgggctgcggcgcgctggcggggacggcgtatgagatcgaccgcgagcagctggccggctggctgggctttgcctccgccacccgcaacagcctcgacagcgtgtccgatcgcgatcatgtgctggagctgctttccgatgcggctatcggtatggtgcatctgtcgcgctttgcggaagatctgattttctttaactccggcgaggcgaacttcgtcgagctttccgaccgcgtgacctccggctcctcgctgatgccgcagaagaaaaacccggacgccctggagcttatccgtggcaaatgcggccgcgtgcagggtgcgctgaccggcatgatgatgacgctgaaaggactgccgctggcctacaacaaagacatgcaggaagataaagaggggcttttcgacgccctggatacctggctcgactgcctgcatatggcggccctggtgctggacggcattcaggtaaaacgcccgcgctgtgcggaagcggcgcagcagggctatgccaacgccactgagctggcggattatctggtggcgaaaggcgtaccgttccgcgaggcgcaccatattgtcggtgaagcggtagtggaagccattgcgcaagggaaaccgctggaagcgctgaccctggccgatctgcagaaattcagcccggtgattgcggacgatgtgtatccgatcctgtcgctgcagtcttgcctcgagaaacgcgcagcgaaaggcggcgtctcgccgcagcaggtagcccaggctatcaacgaggcgaaggctcgtttaagctaatccttagatatctgccctccctgacccggccaagcccagcgacgccgggttttttatgcaaaaaaaaagcggacgcaaggtccgcaaaagttcacgttggctttagttgttcgggtagagaaacagtgtgacgggtcagtgattttcacaggtagaccgtctttatgggcgtattattgaacagaaaacttgatagggataatcgttcgttgctatgctatctatcgccatggactatcgtggcgatggaggatgaataatgaatattcgcgatcttgaatacctggtagcgctcgccgaacaccgccacttccggcgggcggctgactcatgccatgtgagccaaccgacgctcagcggacagatccgcaagctggaggatgagcttggcgtcatgctgctggagcgcaccagccgtaaggttctgtttacccaggcggggctgttgctggtggatcaggcgcgtaccgtgttacgcgaagtaaaagtgctcaaggaaatggcaagccaacaaggggaaaccatgtccgggccgctgcatatcggcctgatcccgacaattggcccgtacctgctgccgcacatcattccgatgctgcatcagaccttcccgaagctggaaatgtatctgcacgaagcgcagacccatcagctgctggctcagctcgacagcggtaagctcgactgcgccatcctggcgctggtcaaagagagcgaggcctttatcgaggtgccgctgttcgatgagccgatgatgctggctatttatgaagatcatccgtgggcgaaccgcgatcgggtgccgatgtcggatctggccggtgaaaagctgctgatgctggaggatggccactgtctgcgcgatcaggcgatgggcttctgctttgaagcgggggcggatgaggatacccacttccgcgcgaccagcctggaaacgctgcgcaatatggtggcggcaggcagcggcattaccctgctgccggcgctggcggtgccgcaggagagaaaacgcgatggcgtagtgtacctgccgtgcattaagccagagccaagacgcaccatcggtctggtttatcgtccgggctccccgctgcgcagccgctatgaacatctggcggaggccatccgcggcacgatggatggccatttcgacaaggcgttaaaacaggcggtttaagccgttcagcgcggcaacccggtacgcttccgccatggtcgggtagttaaaggtggtgttgacgaagtactcaatggtgttaccgccgcctttctgctccatgatcgcctggccgatatgaataatttcggccgcgcgctcgccaaagcagtgaatgccaaggatctccttggtttcacgatggaacaggatcttcagcgtaccaacgctcataccgacgatttgcgcccgcgccaggtgtttaaactgggcgcggcccacctcatacggcactttcatcgccgtcagctgctgctctgttttcccgacggagctgatttccggaatggtatagatcccggtcgggatatcttcaatcagatgcgctgaggcttcgcctttcaccagcgcctgggcggcaatgcgtccttgatcgtaagcggcagaagccaggcttggatagccgatgacatcgccaaccgcatagatgtgcgggagggcggtctgatacatgctgttgaccttcagctgaccgcggctgtcggtctgcagaccgatattttccagcgccagggtgtcggtgttgccggtgcggccgttagcgtacagcaggcaatcggccttcagctttttgccggacttcaggtgcatgatcaccccgtcatccaccccttcaattttctcatactcctcgttgtggcgaataaccacgccgctgttccagaagtgataagagagcgagtctgacatctcctgatcgaggaaggccagcagacgatcgcgggtgttgatcagatcgaccttcacctccatgccgcggaagatcgacgcatattcacaaccgatcaccccggcgccgtaaatgatcacatggcgcggctcatgctgcaggctgagaatcgaatcgctgtcatagatgcgcgggtggtggaaatcgacatccgccggatggtaggggcgcgatccgcaggcgataacgaatttctccgcggtcacagtctcgaccgtgccgtcatggcactccagcgccagagtatgctcatccacgaagtgggcattgccctgcagaatttcacagtggttgcgctcatagaatccctggcgcatatgagtctgctggttgatgacgctgtcggcatggttaaggatgtcggcgaaagaagagcgaagaaggcgggagtggtcgctgtagagggggttttggttaaactcgataatacggctgacggcatggcggagggctttcgacgggatggtgccccagtgggtgcaaccgccgccgacattatggtagcgctcgatgacggcaacgcgtgctccctgtttcaccagtcccatggcggcgccttccccgccaggaccggaaccaatcactattgcatcatagtcccaagagtgtgacatggcattactcacctgttttatacataaaataaacacgatgataacattcgctgcgctttaacccaattatcgttgtgcttttttgcagcataaaagcagaaacggctcgtaaacaatcattcacaatccagggcaaaccgattagttttaatctctggtatagtgccagcagggctattggaaggattcatacatcgtgatgggcgtaagagcacaacaaaaagaaaaaacccgccgttcgctggtggaagcggcattcagccaacttagcgctgagcggagtttcgccagcctgagcttgcgtgaagtggcacgggaagcagggatcgcgccgacgtccttttatcgtcattttcgcgacgtcgatgagctgggcctgacgatggtcgatgagagcggactgatgttgcgccagctgatgcgccaggcgcgccagcggatagccaaaggcggcagcgtgatccgcacctcggtctccacctttatggaatttatcggtaacaacccgaacgccttccgcctgctgctgcgcgagcgctcgggaacttctgcggcgtttcgcgccgccgtcgcacgcgagatccagcactttattgcggaactcgccgactatttagaactcgaaaaccatatgccgcgcgcctttaccgaagcgcaggctgaagctatggtcaccatcgtttttagcgctggcgcggaagcgctggatgtcggccctgagcagcgccggcagctggaggaacggttggtactgcagcttcgaatgatctcgaaaggcgcgtattactggtatcgccgtgaacaagaaaaaatgtcacatcattccgaataacgtgaaggacgagcaatgaaacactcagttcaagataaaggtacgctgttgctggcgctgattgccgggttatccattaatggtgcctttgcggcgctgttcagttcgatagttccgttttccgtcttccccattttatccctgctgctgacggtctattgtctgcatcagcgctatcagaatcgcagtatgcccgttgggctaccgggcctggccgccgccttttttattctcggggtgctgttgtacagcaccgtcgtgcgtgcggagtacccggatatcggttctaacttcttcccggccgttctgtccgtcgcgatggtcttctggatcggctacaagatgcgtaaccgcaaagataccgcagccgagtaagccgccagcggtaaaaaaaccggcaatatgacattgccggtttttttgggcctatttgcgggtcagcagaacgccgcactccatgtgatgggtatacgggaactggtcgaacagcgccagccgggtaacgttgtgcgtctggcttagcgtttccagattgcgacacagcgtttccgggttgcacgaaatgtacaaaatacgcggataggcctgcaccattttttccgtctcgctgtccagcccgctgcgcggtggatcgacgaagatggtttcgcactgatagctatgcagatcgataccctgcagccggttgaactgccgcaccccgttcatcgcctgagtaaactcttccgccgccatgcggataatctgcacgttgtcgatatggttagcggcgatgttgtactgcgccgccgccaccgacggtttggcgatttcggtggccaatacgcgatcgaaattacgcgccagcgccagcgagaagttaccgttgccgcagtacaattccagcaggtcgccagtcgcccctttggtgacatccagtgcccactccagcatctgaatgttcatggccgcgttcggttgagtaaagctgttttccacctgacggtagatcatctcccgcccgccaaccggcaggcgttcatctatataatcctgatcgagctcgattttagttttggtcgcccgcccaatcagatgcacattgagcccctgggctcgcagggcgtcacgcagcgcctccgcttgctctcgccaggcatcgtccagctttttatgatacagcaccgaaacgaccgcctggttgctgagggtggtcagatagtcaatctggaacagcttctggcgtagcacgggattgttgcgtacgccctccagcatggcggtcatcagctgattgatcagcgcgctggcggccgggaagctgtcaacgcgaatccgcgaccgggtctgctgatcgaaaataatatggtacagatcgtcgccatcgtgccacagacggaactcggcgcgcatacggtagtggctgaccggcgaacgaaacacttccggaaccggcgcggcaaaaggcgccatcatggtttgcaaacggacgactttttctgccagctgcgcttcgtattgttcggtaggaaggtgttcgggggtcatgatgtatcctgaataaaataagtacgcggggattgtagggaaagcgccggggatgtccagcctcgaatgccgcgggaaatataattagcagtctggacatctatatggttctgattgtagcattcgcctaccggtcctgtgagttaaaagggaacccagtggaaatctggggctgacgcgcagcggtaaggaaggtgagaaatgagcgcactcggtgcagacactgcggctagccgtgggaagtcattatttcttgaaacagcctccaagcccgaagacctgccggaatacgtcgcactgggttttatcgtcgcgagcaactgataaaacctgcggcatcctttttctgtttcggatgcttttacaatgattaaaaaagcttcgctgatgacggccttatccgtcacggcattttccggctgggcgcaggatagcaattcagatacgttggtggtgacagcaaaccgttttcaacagccggtcaataccgtgctggcgccgaccgacattgtgacgcgcgatgacatcgaccgctggcagtccaaagatttaaacgatgtcatgcgtcgtcttcccggggtcgatattgcccgcaacggcggcatggggcagagcgcttcgctgtatgttcgggggacggaggctcgtcacgtgctggtgctgatcgacggtgtgccgatggcgcgtcctgggatctccaacggcgtagatatcagtcagatccctatctcactggtccagcgggtggaatacatccgcggcccgcgctccgcggtgtacggctccggagcgatcggcggggtggtgaacatcatcaccatgaccgattcagaccgttcacaggttaacgtcggaatggggagtaacggttatcagacttatgacggcgccattaataaacgttttggcgataccgtagtgactgcagctggtgcttatcagaccacaaaaggttttaacgtccagccgaattcgccgtacagcggcgacagcgatcgtgatggctatcgtaacaagcttttcctgggcggtgtgcaacataagtttgacgataacttctctggtttcttccggggctatggttacacagccaatactgactacgatcagggctcgtatggctatgttggcggcaatgatgaaagacagaattacacgcagtcctgggacacgggtctgcgttacagctccggtatctattcctcccagctgattgctaactatcagcgcatcaaagattacaactacagcagcgacgctggccgctatgccgcgggcaccaccctggatgatatggaacagcgctatatccagtggggtaataacattgaggttgggcacggggcgattagtggcggcgtcgactggaagcaagaaaagctcacctccagtagcacaacattgtctgatgcctacaaacgcgataccaccggtctttacctgaccgggcagcagcagattgacagtgtgaccctggaagcatccggacgtgaggatcatgacgagcagttcggatggcacggtacttggcagactgcggcaggctgggagtttattgatggctaccgggctacgctctcttacggtaccggattcctggcgccgtcactgggtcagcaatatggcgcgacgcgttttgcttcgttttatgggcctggcattgcttccaacccaaacctgaagccggaagaatctaaacagtgggaagccggaattgacgggctaacggggccgctggattggcgaatctcagcatatcattatgagattcaaaacctgatcgactataaaaacaatcaatatatcaacgtgaagtcagccacgattaaaggtctggagtggacggggaacgtgacgactggcccggtggagcatcatctgacgttgcagtatgtcgatccgcgtgatgatgatactggcaaggtactctatcgccgcgcgaagcaacaagtgaagtatgaactgaccggacagatctacgatcttgactggaacgtgatgtatcagtacctcggcaagcgttacgatgatgactacgacaatgggcgcgatgtcaaaatgggcggtctgagcctctgggatgtcggtttatcgtatcccgtcacctcacacctgacagttcgtggtaaaatagccaacctgttcgataaagattacgagacagtttatggctaccaatctgcaggacgggaatacaccttgtctggcagctacaccttctgatccacgtcccaccgtgctggtgtttgattccggcgtcggtgggttgtcggtttataatgagattcggcagctgctgccgaatctgcattacatctatgctttcgataacgttgccttcccctatggcgagaagagcgaggagtttatcgttgagcgcgttgtggaaatcgtcaccgctgtccagcagcgttatcccctggcgctggcggtgatcgcctgcaataccgccagtaccgtctccctgcctgccctgcgtgaaaagttcgctttccccgtcgttggcgtggtgccggcgatcaagcccgccgcccgtttaacggcgaacggcattgttggcctgctggcgacgcgcggtaccgtaaagcgtccttatacccgtgagctgatcgaccgctttgccaatgaatgtcggattgaaatgctggggtcggcggagctggtggagctggcggaagcgaagctgcacggcgagcctgtgccgttagaagagctgcgccgtatcctgcgcccgtggctgcggatgcaggagccgccggatacggtggtgctgggctgcacccactttcctcttttacaggaggagctgcagcgcgttctgccggaaggcacacggctgatcgattccggcgcggcgattgcccgacgcaccgcctggctgttagagcatgaagcgccggatgcgaagtccagcgacgagaataaagcattctgcatggcgctgacggcagaaacagaacagcttttacccgttctgcgtcgctatggcttctcgacgctggaaaaattaccgctctaagggcgttttgcacaaaaaagagacggttgaataattttttgaaaacagggcttgtcaacgtctcagaactccctataatgcgcctccactgacacggaacaacggcaagcaagccgccgggtcagcagggttttagcggtgaagttcagcgctaaaaactgacagagaaaagcaaaataagggcttgactctgaatgaggaaaacgtattatacgggacctcgcaacggtgagctgaaagccgcgttgcaactgctctttaacaatttatcagacaatctgtgtgggcactcaaagtgacatggattcttaacgtcctcggacgaaaaatgaataccaagtctcaagagtgaacacgtaattcattacgaagtttaattctttgagcatcaaacttaaattgaagagtttgatcatggctcagattgaacgctggcggcaggcctaacacatgcaagtcgagcggtagcacagagagcttgctctcgggtgacgagcggcggacgggtgagtaatgtctgggaaactgcctgatggagggggataactactggaaacggtagctaataccgcataatgtcgcaagaccaaagtgggggaccttcgggcctcatgccatcagatgtgcccagatgggattagctagtaggtggggtaacggctcacctaggcgacgatccctagctggtctgagaggatgaccagccacactggaactgagacacggtccagactcctacgggaggcagcagtggggaatattgcacaatgggcgcaagcctgatgcagccatgccgcgtgtgtgaagaaggccttcgggttgtaaagcactttcagcggggaggaaggcggtgaggttaataacctcatcgattgacgttacccgcagaagaagcaccggctaactccgtgccagcagccgcggtaatacggagggtgcaagcgttaatcggaattactgggcgtaaagcgcacgcaggcggtctgtcaagtcggatgtgaaatccccgggctcaacctgggaactgcattcgaaactggcaggctagagtcttgtagaggggggtagaattccaggtgtagcggtgaaatgcgtagagatctggaggaataccggtggcgaaggcggccccctggacaaagactgacgctcaggtgcgaaagcgtggggagcaaacaggattagataccctggtagtccacgccgtaaacgatgtcgatttggaggttgtgcccttgaggcgtggcttccggagctaacgcgttaaatcgaccgcctggggagtacggccgcaaggttaaaactcaaatgaattgacgggggcccgcacaagcggtggagcatgtggtttaattcgatgcaacgcgaagaaccttacctggtcttgacatccacagaacttagcagagatgctttggtgccttcgggaactgtgagacaggtgctgcatggctgtcgtcagctcgtgttgtgaaatgttgggttaagtcccgcaacgagcgcaacccttatcctttgttgccagcggttaggccgggaactcaaaggagactgccagtgataaactggaggaaggtggggatgacgtcaagtcatcatggcccttacgaccagggctacacacgtgctacaatggcatatacaaagagaagcgacctcgcgagagcaagcggacctcataaagtatgtcgtagtccggattggagtctgcaactcgactccatgaagtcggaatcgctagtaatcgtagatcagaatgctacggtgaatacgttcccgggccttgtacacaccgcccgtcacaccatgggagtgggttgcaaaagaagtaggtagcttaaccttcgggagggcgcttaccactttgtgattcatgactggggtgaagtcgtaacaaggtaaccgtaggggaacctgcggttggatcacctccttaccttaaagaacctgcctttgcagtgctcacacagattgtctgatgaaaatagagcagtaagtaatctctgcaggcttgtagctcaggtggttagagcgcacccctgataagggtgaggtcggtggttcaagtccactcaggcctaccaaattcttcctgataccgcgttgtgaaacgactcgcatacctgagtatgcttcgccgttccacgccttgtctcagaaagaattaaggttaaaagagattcattcgatggggctatagctcagctgggagagcgcctgctttgcacgcaggaggtctgcggttcgatcccgcatagctccaccatctttactgcgaacacaagaaaacttcagagtgaacctgaaaaggtgcactgcgaagttttgctctttaaaaatctggatcaagctgaaaattgaaacgacacacagttaatgtgtgttcgagtctctcaaattttcgcaatcagaagtgaaacatcttcgggttgtgaggttaagcgactaagcgtacacggtggatgccctggcagtcagaggcgatgaaggacgtgctaatctgcgaaaagcgtcggtaaggtgatatgaaccgttatagccggcgatgtccgaatggggaaacccagtgcaattcgttgcactatcgttaactgaatacataggttaacgaggcgaaccgggggaactgaaacatctaagtaccccgaggaaaagaaatcaaccgagattcccccagtagcggcgagcgaacggggagcagcccagagtctgaatcagcttgtgtgttagtggaacggtctggaaagtccgacggtacagggtgatagtcccgtacaccaaaatgcacaggttgtgaactcgaagagtagggcgggacacgtggtatcctgtctgaatatggggggaccatcctccaaggctaaatactcctgactgaccgatagtgaaccagtaccgtgagggaaaggcgaaaagaaccccggcgaggggagtgaaaaagaacctgaaaccgtgtacgtacaagcagtgggagcaccttcgggtgtgactgcgtaccttttgtataatgggtcagcgacttatattctgtagcaaggttaaccgtataggggagccgcagggaaaccgagtcttaactgggcgttaagttgcagggtatagacccgaaacccggtgatctagccatgggcaggttgaaggttgggtaacactaactggaggaccgaaccgactaatgttgaaaaattagcggatgacttgtggctgggggtgaaaggccaatcaaaccgggagatagctggttctccccgaaagctatttaggtagcgcctcgtgaactcatcttcgggggtagagcactgtttcggctagggggtcatcccgacttaccaacccgatgcaaactacgaataccgaagaatgttatcacgggagacacacggcgggtgctaacgtccgtcgtgaagagggaaacaacccagaccgccagctaaggtcccaaagtcatggttaagtgggaaacgatgtgggaaggcacagacagccaggatgttggcttagaagcagccatcatttaaagaaagcgtaatagctcactggtcgagtcggcctgcgcggaagatgtaacggggctaaaccatgcaccgaagctgcggcagcgacactatgtgttgttgggtaggggagcgttctgtaagcctgcgaaggtgacctgtgagggttgctggaggtatcagaagtgcgaatgctgacataagtaacgataaagcgggtgaaaagcccgctcgccggaagaccaagggttcctgtccaacgttaatcggggcagggtgagtcgacccctaaggcgaggccgaaaggcgtagtcgatgggaaacaggttaatattcctgtacttggtgttactgcgaaggggggacggagaaggctatgttagccgggcgacggttgtcccggtttaagcatgtaggctgattgtccaggcaaatccggataatcaaggctgaggtgtgatgacgaggcactacggtgctgaagtaacaaatgccctgcttccaggaaaagcctctaagcatcaggtaacattaaatcgtaccccaaaccgacacaggtggtcaggtagagaataccaaggcgcttgagagaactcgggtgaaggaactaggcaaaatggtgccgtaacttcgggagaaggcacgctggtgtgtaggtgaagcccctgcgggtggagctgagaccagtcgaagataccagctggctgcaactgtttattaaaaacacagcactgtgcaaacacgaaagtggacgtatacggtgtgacgcctgcccggtgccggaaggttaattgatggggttatccgtaaggagaagctcttgatcgaagccccggtaaacggcggccgtaactataacggtcctaaggtagcgaaattccttgtcgggtaagttccgacctgcacgaatggcgtaatgatggccaggctgtctccacccgagactcagtgaaattgaactcgctgtgaagatgcagtgtacccgcggcaagacggaaagaccccgtgaacctttactatagcttgacactgaacattgagccttgatgtgtaggataggtgggaggctttgaagcgtggacgccagtctgcgtggagccaaccttgaaataccaccctttaatgtttgatgttctaacgttggcccctgaccggggttgcggacagtgtctggtgggtagtttgactggggcggtctcctcccaaagcgtaacggaggagcacgaaggttagctaatcctggtcggacatcaggaggttagtgcaatggcataagctagcttgactgcgagcgtgacggcgcgagcaggtgcgaaagcaggtcatagtgatccggtggttctgaatggaagggccatcgctcaacggataaaaggtactccggggataacaggctgataccgcccaagagttcatatcgacggcggtgtttggcacctcgatgtcggctcatcacatcctggggctgaagtaggtcccaagggtatggctgttcgccatttaaagtggtacgcgagctgggtttagaacgtcgtgagacagttcggtccctatctgccgtgggcgctggagaatagaggggggctgctcctagtacgagaggaccggagtggacgcatcactggtgttcgggttgtcatgccaatggcactgcccggtagctaaatgcggaagagataagtgctgaaagcatctaagcacgaaacttgccccgagatgagttctccctgagactataagtctcctgaaggaacgttaaagacgatgacgttgataggccgggtgtgtaagcgcagcgatgcgttgagctaaccggtactaatgaaccgtgaggcttaaccttacaacgccgaagatgttttggcgatttgagagaattttcagctctgatacagattaatcgatacgttggtgagacgtgttgataaaacagaatttgcctggcggcactagcgcggtggtcccacctgaccccatgccgaactcagaagtgaaacgccgtagcgccgatggtagtgtggggtctccccatgtgagagtagggaactgccaggcatcaaattgcagtaagccggggtgacaaccggtggtaataaagcgaagaaattcggtggagcggtagttcagtcggttagaatacctgcctgtcacgcagggggtcgcgggttcgagtcccgtccgttccgccacttatttaacattaagcctgctcaaatagcaggcttagtggtaagaaaattttaggggcgtagttcaattggtagagcaccggtctccaaaaccgggtgttgggagttcgagtctctccgcccctgccatttataagaatcctttgctcaggcaaaggattttttttatctctaatctccattggcaatatcctctacgaaaataccttgctgatctccgtccatggagagtagcgtttattccagaatagggtttttcaggatctcatggatctgcgcctgcttatcgctattttgtaaccagatcgcataaagtggacgggataacgtagcgctgtccatgaccgtatgtaacccatgcttctctttcgcccagcgagcaggtagccaacagcagccgttcaggcgcgataattgctgatagatcagttcagctgaagaggtagtgagcagcggaacatcatcgcttcctatcagtcccacttcgttttgctgaaaatcaggcccccattcaaggcgcaagtaattcaattcatttctgttttttgcaggcgatgcgcaatacagggcaagagtaaaattacccaacagctggctgcttaattcatccatcttcggcgattcggtggtgatcagcagatccaactggcgttcgtgaagctgtttaaccaacgactgccgctgcgcgatacgggcttcaaactggagattgtaaggtgcgctgtagagggtaccgagccagctgttaagcatacattcccacagggaggcgctggccccaatggagaattcattatgtcgcgaagagtgtgccacctccttgcgcgcagcctgccaggtattcatgagcgtttcggcataggggaggagcttttcgccggcggtcgtcaggcggatgttattacgatgacgggtgaacagattcacaccaagttgattttccagctgacgaatacgaaagctgactgctgactgtgtcaggtaaagcgcctctgctgctcgcccaaagtgacgagttctactcacttccaggaaagtcttgagcaattccgtatccacaccgttctccacaaaattatttgtcgtgatgatttaaatgttttgtttgacgctctgtcaagcgtaactaatactccgcgccataaatagctcggccaaagaatcaggagcgtgtaggatggcggaaagctttacgacgactaatcgttttttcgacaataaaaattatccacgcgggttctcccgtcacggtgatttcaccatcaaagaggcgcaactgctggaacgtcatggttatgcctttaacgaactggaactgggtaagcgcgaacctgttaccgaagatgaaaaacaatttgtctcggtgtgccgtggtgaacgtgagccggtgacggaagcagaacgcgtatggattaagtatatggcgcgtatcaagcggccgaagcgtttccatactctgtccggcggcaaaccgcagatggaaggcgctgacgattacaccgaaagcgatgactaagaaaaaagggcgtaagccctttttttacgccatcattttctgcagatggttgagcatccgatctattgcccgatagctgagcgcctcctgcaaatgacagcgttcaatctcttcaacctctgccagatcggcaatggttctcgcaacctttaacagacgctgccaggcgcgaatagaaagccccagctgcgttagcgtctgttccagccagacagcatcctcccgccttaagcgacagcagttcttcatttcacgattctcaagatgggcattgagtttattttgcctgagcatttgtcgttcacgcgccgccagcacccgctgccggaccgttgcgctcgattcttcgccctgcgagccctgactcagtattcctggcggcggcaatgggatctctaaggaaagatcgaagcggtcgaggaaggggcctgacaggcgtccaaggtagcgcaatgtctgctccggcgatgcacgattatgtttaccctgataatgtcctgtcgggcttggattcatcgctgcaataagctgaaagcgcgccggatagtcaattttggcgcgcgagcgtgatatgtggatcttgcctgactcaatgggttcgcgtagcgcatccagtacccgccgctcaaactccggcagttcatcaagaaacagcacgccattatgggccagggaaatctcaccggggaccggtatcgagccgccgcccaccatcgctgccagcgaggcgctatggtggggggcgcggaacggcctctgacgccaccgcgtctttgcggtgtggaggttgaccagactctgtatggccgcgctctccagcgcttcctgattgcttaatggcggcaggagaccggggagtcggctggctagcatggttttcccggtcccgggcgggcctatcaggagcaggttgtgaccaccggcggccacaatctccagcgctcgtttgccctgctgctggccgataacatcgagcagatcttcgtagcgttcatcccgagcaggcgcctcggcgagaggcggcgaaagcgatgtctgccccgcaagaaatgcgcaaacctcctgcagatggtcggcgaccagacaatcgctgccgccgatcaggccgacctccgccgcattgtcagaggagacgacaatgcggcggccggctttgatggcctccattgcgctggggatcgcccctggaacgcctcgtaacccacctgtaagggcgagttcgcccacaaactcatattgattcagtcgcgtcgtgttgagctgctctgaggcaacgagaagcgcgagagcgatgggcagatcgtatcgtccgccttctttgggcagatccgctggcgccaggttaatggttatcttcttcgcaggaaaagcgtagccgctgttgatcagggcgctgcggacccggtcgcgggcctctttcacggtggtttccggcagcccgaccatagttagaccaggaagaccgttgctgagatgaacctcaacggtaatcaatggcgcttcgataccgagcgccgcgcgagtatagacgatagcgagcgacataaaacctcctggacagagaagaattatggttggcatgacgtaaagcgagaatggaaaaagtgcgaatttagaactgcgtatccatacttttcgcgacacatcgttacatttagccgaaaatggacgtttgatcgcaaaacagagctatgttggcaaagagggcgccgaagagcgcggcaggggtgagaaaactgaatttttttcatttttgatttttttcatataaaacaattatttttattgaaaccgttaggctgatcagcaacgaagatataaaaaaatcttgtgctttatgtgatgtctgtggtaactctttaggtattccttcgaacaagaagccagaaagtatagaaaatgacagcccttctacgagtgattagcctggtcgtgattagcgtggtggtgattattatcccaccgtgcggggctgcacttggacgaggaaaggcttagaaatcaagccttaacgaactaagacccccgcaccgaaaggtccgggggtttttttataactgaaataacctaagcgaggagcagatgatgacttttagcataaaattctgtttctcccgatttatgacggggaactaactatgaatggcgcgcagtgggtggtacatgctttgcggacacagggagtcgacacagtttttggctatccgggtggcgcaattatgccggtttacgatgcactgtatgacggcggcgtggagcacctgctgtgccggcatgagcaaggggcagccatggcggccattggttatgcgcgagcaaccggtaaaaccggggtgtgtatcgcgacgtccggcccgggcgcgaccaatctgatcaccggcctggcggacgccctgcttgactctattcccatcgtagctatcaccggccaggtggccgcacccttcatcggcacggatgcgttccaggaagtagacgttctcggtttgtcactggcctgtactaagcacagtttccttgtgcagtctctggacgaactgccgcgggttattgccgaggctttccaggtggcaaactcaggccgtccaggtccggtgctggttgatatccctaaggatattcagatggcgcagggcgacctcgatccccatttctctaccgtcgccgatgagatggcatttccgcaggcggaagtggcgcaggctctgcagatgctggcccaatcgcagcaaccgatgctgtatgttggcggcggggtcggcatggcgcaggcggtaccggctttgcgcgaattcctggcggtgaccaggatgccggcaacctgcaccctgaaagggctgggcgtggtggatgctgattatccctattatctcggcatgctgggaatgcacggcactaaggcggccaacctggcggtacaggagtgcgatctgctgatcgccgtcggcgcgcgctttgacgatcgcgtaaccggtaagctcaataccttcgcaccgcatgccaaagtgatccacatggacatcgatccggcggagctgaacaagctgcgtcaggcgcatatcggtctgacaggcgatctgaactgcctgctgccggcgctgcagcagccgttagctatcgatggctggcgcgagcggagtgccgcactgcgtgccgagcatgcctggcgttacgatcatcccggtgaggcaatctacgcgccgctgctgctgaagcagctttccgaccgcaagccggcggacagcgtggtgaccaccgacgttggccagcaccagatgtggtcggctcagcatatgacctatacccgcccggaaaactttatcacctccagcggcttaggcaccatgggctttggcctgccggccgccgttggcgcccaggtggcgcgccctaacgatacggtgatctgtatctccggtgacggctccttcatgatgaatgtacaggagctgggcaccgttaaacgcaagcagttaccgctgaagatcgtgttactcgacaaccagcggttagggatggttcgacaatggcagcagctgtttttccaggaacgttatagcgaaaccactctgactgataaccctgatttcctcacgctggccagcgccttcggtattcctggccaacacatcacccgtaaagaccaggttgaagcggcactcgacaccatgctttcgagccaggggccatacctgcttcatgtctcaatcgacgaacttgagaatgtctggccgttggtgccgcccggcgccagtaactctgaaatgctggagaaattatcatgatgcaacatcaggtcgctttacaggcacgtttcaatccggaaaccttagagcgcgtgctgcgcgttgtccgccaccggggtttccacatctgcgcaatgaacatggaaaccgcgccggacgcacagaacataaatatcgaattgaccgttgccagcccgcggcccgtcgaattactgtttagtcaattaagcaaactggtcgacgttgcctgcgtcgagatccagcaacccacatcacaacaaatccgcgcctgagcgcaaaggaagaaaaatgacgacgaaaaaagctgattacatttggttcaatggcgagatggttccgtggggcgaagcgaaagttcatgtgatgtcccatgcgctgcactacggtacctcggtattcgaggggatccgttgctacgactcgcacaaaggcccggtggtgttccgtcatcgcgaacatatgcagcgtctgcatgattcagccaaaatttatcgtttcccggtctcccagagcgtcgacgaactgatggaagcctgccgcgaagtcattcgaaccaataatctgaccagcgcttatatccgtccgctggtgtttgttggcgatgtcggcatgggggtaaacccgcctccgggttacaacactgacgtgatcatcgcggcgttcccatggggagcctacctcggcgcagaagcgcttgagcaggggatcgatgcaatggtctcttcctggaaccgcgcggcgccgaacactatcccgacggcagcgaaagccggtggtaattatctttcctcgctgctggttggcagtgaagcgcgtcgccatggctatcaggaaggtatcgccctcgatgttaacggctatatctccgaaggcgcaggggaaaacctgtttgaagtgaaggacggtgtactgttcaccccgccgtttacctcttccgcgctgccgggcattacccgcgacgccattatcaagctggcgaaagatcttggtatcgaagtccgcgagcaggtgttgtcccgtgaatccctgtatctggcggatgaagtcttcatgtccggcactgcggcggaaatcaccccggtacgcagcgtggacggcatccaggtcggcgcaggccgtcgcggtccggtaaccaaacgcattcaggaagccttctttggcctcttcaccggtgaaacagaagataaatggggctggttggatccggtaagtaagtaattaaaaatgggacggcacgcaccgtcccatttaataaacacagatgggagtaaaaagagcatgcctaagtaccgttccgccaccaccacacatggccgcaatatggcgggcgcccgcgcgttgtggcgcgcaaccggaatgaccgatgccgatttcggcaaaccgattatcgccgtcgttaactcctttacccagtttgtccccgggcacgtgcacctgcgcgatctcggcaaactggttgccgagcagattgaagccgccggtggcgtggccaaagaattcaacaccatcgcagtggatgatgggatcgctatgggccacgggggtatgctctattcactgccatcccgcgagctgatcgccgactcggtggagtatatggttaacgcccactgcgctgatgccatggtttgtatctccaactgcgacaaaatcaccccggggatgctgatggcctccctgcgtttgaatattccggtgatctttgtttccggcggcccgatggaagccgggaagaccaagctgtcagataaaatcatcaagcttgacctggtggatgcgatgattcagggggcggatccgaaagtgtccgacgagcagagtaatcaggtggaacgctccgcctgcccgacctgcggctcctgttccgggatgttcacggcgaactccatgaactgcctgaccgaagcgctgggcctgtcgcagccgggcaacggctctctgctggcgacccacgccgatcgtaaggagctgttcctaaacgccgggaaacgtatcgtggagctgaccaaacgctattacgagcaggatgacgcttccgcgctgccgcgcaatatcgccagcaaggcggcctttgagaacgctatgacgctggatatcgccatgggcggctccaccaataccgttctgcacctgctggcggcggcgcaggaagctgaaatcgacttcaccatgagcgatatcgataagctctcccgcaaagtgccgcagctgtgtaaggtggcgccgagcacgcagaaataccatatggaagatgtgcatcgcgccggcggcgtgctgggcattctgggcgagctggaccgcgccgggctgctgaatcgcgaggtcaaaaacgtccttggcctgacgctgccgcagaccctggaacagtacgatgtgatggtgacccaggacgacgcggtgaaaaaaatgttccgcgccggcccggcgggcatccgtaccacccaggcgttctcgcaagactgccgctgggataccctggatgacgatcgcgccgaaggctgtatccgttctctggaacacgcttacagcaaggacggcggcctggcggtgctgtacggcaatttcgcagaaaacggttgtatcgtgaaaaccgccggcgtggacgacagcatcctgaaatttaccggtccggcgaaagtatatgagagccaggacgatgcggttgaggccatcctcggcggtaaagtcgtggaaggcgacgtcgtggtgatccgctacgaagggccgaaaggcgggccggggatgcaggaaatgctttaccccaccagcttcctgaagtcgatggggctgggcaaagcgtgcgcgctgatcaccgatggccgtttctccggcggcacctcagggctctctatcggccacgtctctccggaagcggcgagcggcggcaacattgcgctcattgaagatggcgacatgatcgcgattgatattccgaaccgcagcatccagctgcagctgagcgatgcggaaattgcggcgcgtcgtgaagcccaggaagcgcgtggcgaccaggcgtggacgccgaagaatcgccagcgtcaggtctcctttgctcttcgcgcctacgccagcctggcgaccagcgccgacaaaggcgcggtacgcgataaatccaagctgggtggctaatcatggcggattcacaacccttgtccggcgcccctgagggcgccgagtacctgcgagcagtgctgcgcgcgccggtttatgaagcggtgcagaaaacgccgctgcaaaaaatggataagctctcgtcgcggctggataacgttattctggtgaagcgtgaagatcgccagccggtacacagctttaagctgcgcggcgcttacgcgatgatgtccagcctgactgccgaacagaaatcccacggggtgatcaccgcttcggcgggcaaccatgcccagggcgtggcgttttccgcatcgcggctgggcgttaaggcgctgatcgtgatgccggtagcgaccgccgatatcaaagtcgatgccgttcgcggctttggcggcgaagttctgctgcacggcgccaactttgacgaagcgaaggcgagagcgattgagctggcgcaacagcagggttttacctgggtgccgccgttcgatcacccgatggtcatcgccggacagggaaccctggcgctggagctgctgcagcaggatgcccatattgaccgcgtattcgtcccggtgggcggcggcggtctggcagcgggcgtggcggtgctgatcaagcaactgatgccgcagatcaaagtgatcgcggtggaggcggaagattctgcttgcctgaaggcggcgctggacgcaggccatccggtggatctgccgcgcgtcggcttgtttgccgaaggcgtggcggtcaaacgcatcggcgatgaaacgttccgtttatgccaggagtatctggacgatatcatcaccgtcgatagtgatgctatctgtgcggcgatgaaagatctgttcgaagatgtgcgggcggtggcggagccttccggcgcgctggcgctggcggggatgaaaaagtatatcgcccagcataacatccgcggcgagcgtctggctcatattctgtccggggccaacgtcaacttccacggcctgcgctacgtgtccgagcgctgcgagctcggggaacagcgcgaagcgctgctggcggtgacgatcccggaagagaaaggtagctttttgaagttttgccagctactggggggccgctcggtgacggagttcaactaccgctttgccgatgccaaagacgcctgtatttttgtcggggtacggctgagtcgtggcctggaagagcgcaaagagatcctccagttactgaacgacggcggctacagcgtggtggatctctctgatgatgagatggctaagctgcatgtgcgctatatggtcggcggccggccgtcaaaagcgctgcaggagcggctgttcagcttcgagtttccggaatcgccgggggcgctgctgaaattcctgcatacccttggcacccactggaatatttcactgttccactaccgcagccacggcactgactatggtcgggtactggcggccttcgagttgggcgagcacgagccggactttgaaactcgtctcaatgagctgggctatgagtgccacgacgaaacgcataacccggcattccgctttttcctcgcgggttagtggttgggaagaattttccagaaagcatcaataagcggctcatgcagccgctttttttgtgcgcaaacacccagctcaaacggcgtttgctcatcgctgcgctccaggatcatcaccctgttgcgtaccggctccggactgttctccagcaccacttccggcagcagcgccacgccgcatcccagggcgaccatcgacaccatcgcttcgtgcccgccgacggtggcgtagatcgacggattgctgattttatgccgccgaaaccacagctcgatgcgccgacgtaccggcccctggtcggccatgataaagggcactgtcgaccagtcggggcgctcgacggtcacctggttgcgcaccgggcagggaagggccggggcaattaacaccacggcgaggttctccagcatcgaaaacgccaccgaccctggcagagtctccggcttaccggcaatcgccaggtcggcttcgccggtgacgaccttctccatagcgtcggcggcgtcgccggtcgagagcttgatctccaccgaggggtgcgcggcgcgaaagcggtcgaggatcggcggcagatggctataggcggcggtgacggagcagaagatatgcagctcgccggagagcgaagggccctgctgatcgatgacgtgacgaagctgctggtactgcaataaagtttgctgggcaaaggtacgtaactcttccccggcttcggtaagggtcaccgtgcgattatctcgcacgaacagcggctggccgaggtcctcttccaggcgttggatctggcgcgaaagcgtcgacgggctgacgtgcatggcccgcgcgctgcggccaaaatggcggctttccgccagatgcagaaaggttttcagatcgcgtaaatccacggcgcgtactccccggttttgtatttcataaaatgcaacgtgacgttgtgaatatatcaatttccgcaataaaattcctgtcatatagtaagttcattctcgcaaaagcgaaccgaacaataagcacgacacaacatcacggagttacagacatggctaactactttaatacactgaacctgcgccagcagctggcacagctgggcaaatgccgctttatggcgcgcgacgaattcgccgatggcgcaagctaccttcagggtaaaaaagtggtcatcgtcggctgcggcgcgcagggcctgaaccagggtctgaacatgcgtgactccggcctggatatctcctatgcgctgcgtaaagaagcgatcgctgagaagcgcgcctcctggcgtaaagcgactgaaaacggcttcaaagtcggcacttatgaagagctgatcccgcaggccgacctggtggttaacctgacgccggacaaacagcactcagacgttgtgcgctccgtacagccgctgatgaaagacggcgcagcgctgggttactcccacggcttcaacatcgtggaagtgggcgagcagatccgtaaagacatcaccgtggtgatggtggcgccgaagtgcccgggcaccgaagtgcgtgaagagtacaaacgcggtttcggcgtaccgacgcttatcgcggtacacccggaaaacgacccgaaaggcgaaggcatggcgattgccaaagcatgggctgcggcgacaggcggccaccgcgcgggcgtgctggaatcttccttcgtggcggaagtgaaatctgacctgatgggcgagcaaaccatcctttgcggcatgctgcaggcgggttctctgctgtgcttcgacaagctggtggcggaaggtaccgatccggcgtatgcagaaaaactgattcagttcggctgggaaaccatcaccgaagcgctgaagcagggcggcatcaccctgatgatggatcgcctctccaacccggcgaaactgcgcgcttatgcgctgtccgagcagctgaaagagatcatggcgccgctgttccagaaacacatggacgacattatctccggcgaattctcctccggcatgatggcggactgggcgaatgatgataagaaactgctgacctggcgtgaagagaccggcaaaaccgccttcgaaaccgcgccgcaatatgaaggcaaaatcggcgagcaggagtacttcgataaaggcgttctgatgatcgcgatggtgaaagcgggcgttgagctggccttcgaaaccatggtggcctccggcatcatcgaagagtctgcttactacgaatcactgcatgagctgccgcttatcgccaacaccatcgcccgtaagcgtctgtatgagatgaacgtggttatttccgataccgctgaatatggtaactacctgttctcttacgcttgcgtaccgctgctgaaagagttcatgaccaccctgcagaccggcgacctgggcacagcgattgccgaaggcgcggtagataacgcgcagctgcgcgatgtgaacgaagcgattcgcagccacgctatcgagcaggttggtaagaaactgcgcggttatatgactgatatgaagcgtatcgcggtagccggctaattcctcgtcgtctttcgacttgccgatgcgttggctacggtacgtacaccccagtcacatagtaatctttgttcctggggatgtacttccttgccgccttccggcaagccgaaatccatagaggcatggatttgtttagtaggcctgataagcgaagcgccatcaggcaaaaacccggagattaagatccccgggtttttttattatttccggtacagcactttgatgatgtggtagccgaactgggtatgcagcgggccggttggctccagttcagggcaggagaagaccactttatcgaaggctggtaccatctggccctggcggaactcacccagatcgccgccgcgtttgcctgacggacaaatggagtgtttctttgccagcttgccgaaatcggcgccgtttttgagctgctcgagcagatcgagcgccagtttctcttcttttaccaggatatgcagtgctgccgcggttttagccatgattgcgccttgagtgagttgggataaatcagggcgccatagtatcacgcgctagcggcgatacagcaccttgatgatgtggtagccgaatttggttttcaccgggccatagggtttgagcagcggacagctgaagacggcttgatcaaacggaccgaccatcgcgccttgctgaaactcgcctaagtcgccgccgttgcggccagacggacatttagaatagcgtttcgccagatgatcgaagctgacgccccgctccagtttggcgaggatctccagcgccagtttctcttctttgaccaggatatgcagggccgctgcgctttttgccatgacatcattctcaggatggtttgcgtggctgacactttaccatcagtcagtaaatctcggctccgctttctgctacaatccccaccccgttcgaagattgagcaagactcccatgcgtttaaaccctggccaacaacaagccgtcgaattcgtcaccggaccgtgcctggtgctggcgggcgccggttccggtaagacccgcgttattacgaataaaatcgcccacctgatccgcggctgcggctatcaggcgcgccatatcgcggccgtgacctttaccaacaaagccgcgcgcgagatgaaagagcgcgttgggcaaacgctggggcgcaaagaggcgcgtgggctgatgatttccaccttccacactttggggctggatatcattaagcgcgaatacgctgcgctgggtatgaagtctaacttttccttattcgacgataccgaccaggtggcgctgcttaaggaactgaccgaagggttgatcgaagatgacaaagtggtgcttcagcagctgatctcgacgatctccaactggaaaaacgatctaaaaaccccggcgcaggccgccgctggcgcgaaaggcgaacgggatcgtattttcgcccactgctatgggctatacgacgcgcacatgaaggcctgcaatgttctcgattttgacgatctgatcctgctgccaacgctgctgctgcagcgcaacgaggaggtgcgcgagcgctggcaaaataagatccgctacctgctggtagatgagtatcaggataccaataccagccagtatgagctggtgaaactgctggtgggtcagcgggcgcgctttaccgtggtgggcgatgacgaccagtcgatctactcctggcgcggcgcgcggccgcagaacctggtgctgctcagccaggacttcccggcgctgcaggtgatcaagcttgagcagaactaccgctcatccgggcgtattctgaaagccgccaacattttgatcgccaataaccctcacgtctttgaaaagcggctgttctccgaactgggatatggcgcagagctgaaagtgctctccgccaacaatgaagatcatgaagcggagcgcgtggccggggagctgatcgcccaccacttcattaataaaaccaattacaaagactacgcgatcctttatcgcggcaatcaccagtcgcgggtctttgaaaagatgctgatgcagaaccgcatcccgtacaaaatctccggcggcacgtcgttcttttcgcgtccggaaattaaagatctgctggcctatctgcgcgtgctgaccaacccggacgacgacagcgccttcctgcgtatcgtcaacacgccgaagcgcgagatcggcccggcgacgctgcaaaagctcggtgagtgggcgatgggccgcaacaaaggattgttcaccgccagctttgatatgggtctcagccagacgctgaccgggcgcggctatgaatccctcacccgcttcacccactggctacgcgagatccagcagctggccgaacgcgagccggtcaacgccgtgcgcgatttgattcgcgggatcgactacgaatcctggctgtatgaaacctcgcccagcccgaaagccgcggaaatgcgcatgaaaaacgtcaaccagctgtttacctggatgaccgagatgctggaaggcagcgaaatcgatgagccgatgaccctgacccaggtggtcacccgctttaccctgcgcgacatgatggagcgcggcgaatcggatgaagagctggatcaggtgcagctgatgactctccatgcgtcaaaggggctggagttcccctacgtttatctggtgggaatggaagagggattgctgccgcaccaaagcagcattgatgaagataacgtcgatgaagagcgacggttagcctacgttggcatcacccgtgcgcagaaagagctgacctttacgctctgtaaggagcgccggcaatatggcgagctggtgcgtcctgaaccgagtcgttttctgctggagctccctcaggacgaccttatctgggagcaggcacgcaaaaccattacgcctgaagagcggatgcaaaaaggccaggccaacgtcgctaatattcgggcgatgctggcaaaggcgaaaaaagcttagcgtctcaggcgataaactgctgccaggcggcggagaagggcatcaccagtattagcgagggcagcatattggcggtagggaaggcacggatcccgcacagacggaaaccggtcgccagcataatgatgccgccgcaggcggtgaagtcggcgatcatcgacggattgattaacgccatgataaaggttgccgcgaaaaacaggataacgaaaacaatcagctggggaataaagatcacggtgatgatataccccagcgtggaggcgaaaatcgcggcagtaaaaaagtcgaggatcgacttggtcagcagaatggtcgggtcgccggtcatcccttcggttaaggcgccgaagatgccggtaccgctggcgcagaacaggatcagcacggcgataaactgattcataaaatcttccgcaccgacgctggcgctggactgcgccggaaagatacgttcaatggggctgcgcagcgttgttccggctcgttcaatccatttttcaatattcaacaggccgccgataatcgtgccgacaataatagccagggcaatcggcggcaggttatgcaatttattgacaaagaatatgcccatactgattgagatcagtccggcgatcaacggtaaggtttttttgaaatgttccggaataaaacgattcagtgaagcgcccgccagcgcaccaacgagaagcgagccgctacagacaaatatacctatagccataatttattttccctaataaaaatcagggcctgaatatacaggccctgaaatatttaaattaattatttaatgttaaatacgcggctggcattaccccaggcgattttctctttcaggcctgcttcaagttctaaaggatcaaaccagtcgcaggcctgatgaatatcttcatacggataatcgacagagaacatcacgcgatcggcgcccatgacttcaatagcattattcagtgaatgggtattgaaatggccgctggtggtaacgatgaagttattctgcaggtagtgcattaacggtttttccgctttacccagaccgcagccgaaacgctgacgatagagacgatgttgagtgcgcggcagcatatgtaccagcccttcgccgaggtgacccagcaccagattgaggttaggataacgatcgaacagaccgctcatcatcagacgaatagcatgcactgccgtttcctgagcgaagccccaggcagagccgatcaggctttcgtaaccggtatagatgccacgcgccgggccttccagcggttcacgaggatgcagatagacaggcacgttcagctcgttgaccttatcccagaataccagcatggattcgtcatcaagatacaggccatgctcgctatctttaacgttggtgtagccgttgatcagcgcacctttcatgcctaactttttcacggcgcgctccagctcttccgccgcggcttccgggttctgcaatgccagggtggcgaaggcgctgaatttgtccggatttggcttaacataattctcaacgataaaatcgttggtatcgcgggcaaaagagacggctttggctttatctaaaatagactgggcgccaggtgaagtcagagaaagaattacatgatcaatatgacgctgcgccatttcttccagctgaatgctgcgatccagcaggcggcgttcaacatctttcatatattctgtgccgttacgacctgcttcaccagatgaatcccacagacggttattttcaggagtggatacgtgttcttctaaagcaatttttccgcgcatgatattttccttgcgatatgagtcagtgtggcttgatgcgaggagaataaaagctttcgcgtattaccagcaataaaccaaacgtaataggggttattaataaaaccaatacacgggcgtattttgttacttagattttaatagaagtactctgctgtgcgggatcggcaagcgtagcgatcagcgagcgtagccagatatgtccgggatcgcggtgcagccgctgatgccagacctgacggatggcgattttggcgaggggaaaaggcagcggccagctgcggcagggatagcgccgggtgatatgccgcgccacctgttccgggacgacggcaatcatatcgctttcggccaccagctcaccggtacctaaaaaacttggtaacgttagcgcaatgcgccggggcatgtggtgctcatcaagcagcttatccatatcgccatgggcagtcccctccacgcggatcgccagatgcttttcctggcgccagtcttcggcgcggagctgtgcgcgaatgcgaggatggttttccgcagccaggcagacatatgattgttcgaagagatgttgctggtagacgctttccggaagctgcgtcagatagccgatcgcgagatcgcatttcccggattcgagggcgttgagggtctgctcatccagattctgtaccgtaaaggtgatcccgtccgccgcctgctgctggagcgcaatttgcaataaaggcagcagcgtcatttggctgatatcggtcataccgatcgtaaaattacgctggctctgctggggaagaaattcaggtttgaccgctaaatcgttatcggcaagctggagaagagtcgagatggtgggggcgatcgcgtccgctcgcggcgtcgggatcatccgctgcccgacccggacaaacagcgggtcagcaaaatgatctcgtagttttttcagcaaaaggctgccggtgggctggctgatatcgagcgcgtcagccgctggggaaacattgcccaagcggtagagcgcagagaaaaagcgtagcgatttgaaatccagttcttcccgcatccgccctcctggctggatattatttcagcgtatcgccgctggcgacccgaagtatccagtggacgtagctttgccactgacactcctgatcgaccatctcccgacccagcggatgttcatccagccagtttcccggcaatatcagcgtcagttgttcgtcttgagcggtcagctgaatggcgggcaacagatcgtcgcgccgccggctggcaaacaggattgccagtcgcagcagacgacacagatgctcagccacccgcggtgggacggcattctgttgatgaagcgaagagaggtcgatagcgttagtctggttaaggagcagcgtggcaatcagcttcttctgcgccggggtaaagcccggcaggtcgaggttattgaccagataggcggcatgctgcggcgcgcgcttaaaatccacgctcagcccaatctcatgcagcgcacaggcgctaaggagtaaatcacggcttagcggatccagctcccagctgccatccaactgactgagcagatgactggcaaggccgccgacgcgctgggcctgttcggtgtcgatcataaaacgacgctgaatattacgcagcgtgcggctgcggatgtcctgctcaacggagagatgcagcatgccgtacaccaggccttcgcgtaacgcgccgcccgcgagggtcatacactgaatattcagttcgctgaagatagcgatcaggatcgccagcccgctaggaaacaccagcgcccgctcaagggttaagccttcgatctccagctcttccagacgtccgcactggatagcgcgctgtttaagctgctggagtttggcgagggtgattcgttcatccatcccctgcgccatcataatttcctgcagagcctgaacggtgccggaggcgccaacgcacactttccatccgtgatagcgcagcacatcggcgacgggcagtagtacctcgcgcgcagccgcttcggcgagatcgaaattctctttcgtcagactacggtcggcaaaatagcgttcaagccaggtgacacagcccatcgacaggctaaacagcgaggttgtttgtgcgccggtcccggtcaccagctcggtgctggcgccgccgatatcgaccaccaggcgctgatcggcgccgccggtggtgtgggcgacaccctggtaaatcaggcgcgcttcttcttcgccgctgatcacttgcactggagtgccgaggatctcctgcgctttcgccagaaactcccccgcattgacggcaagacgcagcgtggcggtggccacgacgcggatttgcgtcggcggaatatcctgcaggcgctcggcaaacaggcgtaagcactgccagccccgttccatcgcttctgcggagagggtgttgtcgctattcaggccggcggccagtcgaaccttacgcttaatgcggctcagcgtctggatgctgcccgccacctcgcgcaccaccaacatatggaaactattggagcccaaatcaatggcggcatatagcgaggtggagctcatactcttcatcgttcagaaggctccctggtcggcggggcgcttaggcccgatccacatcactgagcgggtcgccagaggaaggtcgccctggcagattctgaatgactgagcgtatggcatagatctcttaacctgaacgacgacgattgcgcggtggaccgttacggcgcgggccgttgcctgggcgcgcacgggtcagacgcagcggcttaggcaggtcggtcatcagcgcgtccgggttgtacttactgaccggaattgagtgaccaatataggtttcgatcgccggcagattcagcgcatactcttcgcaggcgaggctaatggagtgaccgctggcgccagcgcgaccggtacggccgatgcggtgaacgtaatcttcgcagtcgtccggcagatcgtagttaaagacgtgagtcacggccggaatatgtaagccacgggcggcaacatcggtcgcgaccagaatatcgaggtcgccacgggtaaattcttcgagaatgcgcagacgttttttctgcgccacgtcgccggtcagcagacctacgcgatggccgtcggcggcgagatggccccagatatcttcgcaacggtgcttggtattggcgaaaacgatggcgcgatcgggccactcttcttccagcagcgtctgcagcaggcgcattttttcttcgttggacgggtagaagagctcttctttaatacggtggcccgttttctgttccggctcgacttcaacgtactcggcgttattcatttgttcgaacgccagttcgcggacgcgataagaaagggtcgcggagaacagcatgttcaggcgctgagtggccggcggcatgcggcggaacagccagcggatatctttaataaagccgagatcgtacatgcgatcggcttcgtccagcacgacaacctgaatggcgccgaggttaatgtggttctgcttcgcgtaatcgatcagacgaccagtggtaccgatcagaatatcgacgccgctttccagcactttcaactgcttatcgtagccgtcgccgccgtaagccagacccagcttcagaccggtggcctgcgccagtggctcagcgtcggcgtggatctgtaccgccagttcacgcgtcggcgccataatcagcgcgcgcggttggttaacctggcgatcggcgatagccgggtgagagagaagataatgaaacgttgacgtcaggaacgccatcgttttaccggtaccggtttgcgcctgcccggcgacatcgcggccttccagcgtcagcggaagggcgagggcctgaatgggtgtgcaattatgaaaccctttcttttcaagggcttcaatgactgccgggtgcagggcgaagtcggaaaacttctgttctgttaaatgtgttttgctcatagtgtggtagaatatcagctaactattgcattaagaaagcgtatccggtgaaataacgtcaacctttcgttggcggtgtacgaaattattcaaggtacgtctacggtaactgaacgaatccaggatagcttagactactaagcgagtcgggagcgataaatctgcagcatgcagttcgcgttcaggcaccctggcgtcaacaggcgagtccatgatggattgcgccagttggcaggccagagaattgaggtatcctgaagaatagcgtgcataacgtagccgcagcgcgtcgttgatggctacgacaccaacacaccaggcttattcctgtggagttaaatatgagcgataaaattattcacctgactgacgacagttttgacacggacgtactcaaggctgacgggctgaccctcgtcgatttctgggcagagtggtgtggtccgtgcaaaatgatcgccccgattctggatgagatcgctgaagagtatcagggcaaactgaccgtagctaagctgaacattgaccagaacccgggcactgcgccgaaatacggcattcgcggtatcccaaccctgctgctgtttaaaaacggcgaagtggcggccactaaagttggcgcactgtccaagggtcagctgaaagagttcctcgacgctaacttggcgtaagcgaattgctgttccggcgtccagattcctattttttgcggaactctggacgcccggctggagtcgtgctaagttaatccacagacttcgttttaaacataccttgtttgaatcttgttttacccgaagcatcccgcataaatgcgcgtgaagctaataattccgggcttttcactcattccgtctagtcgtttcagttctgcgttctttcctgtgaccaggcaacgtacagacacgagatgaaggccgttaacaggcatggaagttcctgccataccattcacaacattaagttcgagatttaccccgagtttaagaacccacaccactatgaatcttaccgaattaaagaatacgccggtttctgagctgattactctcggcgaaaatatggggctggaaaacctggctcgtatgcgtaagcaggatattatttttgccatcctcaagcagcattcgaagagtggcgaagatatctttggcgacggcgtactggagatactgcaggatggatttggattcctccgctccgcagacagctcctacctcgccggccctgacgacatctacgtatcccccagccaaatccgccgtttcaacctccgcactggtgacaccatttccggtaagattcgtcctccgaaagagggtgaacgttactttgcgctgctgaaagttaacgaagttaactacgacaagccggaaaacgcgcgtaacaagatcctgttcgagaacttaacgccgctgcacgcgaactctcgcctgcgtatggagcgtggtaacggttctaccgaagacttaaccgctcgcgtactggatctggcctccccgattggccgcggccagcgtggcctcatcgtcgcgccgccgaaagccggtaaaaccatgctgctgcagaacatcgcgcagagcatcgcatacaaccacccggactgtgtcctgatggtactgctgatcgacgaacgtccggaagaagtgaccgagatgcagcgtctggtgaaaggtgaagtggttgcttccacctttgacgagccggcatcccgtcacgtgcaggttgccgagatggttattgagaaagcgaaacgtctggttgaacacaagaaagacgttatcatcctgctcgactctattacccgtctggcgcgtgcctacaacaccgtggttccggcttccggtaaagtgttgaccggtggtgtggacgccaacgccctgcaccgtccgaagcgtttctttggtgcggcacgtaacgtcgaggagggcggtagcctgaccatcatcgccacggcgctgatcgacaccggttccaaaatggacgaagttatctacgaagagtttaaaggcaccggtaacatggaactgcacctctctcgtaagattgctgaaaaacgcgtcttcccggctatcgactacaaccgttccggtacccgtaaagaagagctgcttaccactcaggaagagctgcagaaaatgtggatcctgcgcaaaattatccatccgatgggtgagattgatgcgatggaattcctcatcaataagctggcaatgaccaagacgaatgatgacttcttcgatatgatgaagcgctcgtaaggtaaaaaaagccaaaaacgccacgcctttgcgtggcgttttcattttggggtttgtatgatccagagacagagaaagcgggacgaaagttgtcgtataatggcgccggatagcaggcggagacagctttaacagactaaaatctatacaataaatttgtaatgttctgcttttccccttctggagttggggcatcatcgctatacttcccggattaactatgctgagagcacatgcgttgtgaatttactcactgctattactgaattaatcagtattttcttattcacgaccctctttatttttgtcgcgcggaaagtggcaaaaaagatcgggttagtggataaacccaactatcgcaaacggcatcaggggttgattccgttggtcggtggtatctcagtttatgcaggtatctgtttcactttcgccatcgccgattattatattcctcacgcctcgctgtatctggcctgcgcgggggtattggtgctggttggcgcgcttgacgatcgcttcgacatcagcgtgaaaattcgcgcggtcattcaggccgcgatcgccgtgattatgatgatggcagggaatctgcatctgagtagtttgggctttatttttggctcgtgggaactggtgctggggcccttcggcttcttcctgacgctgtttgccgtctgggccgctatcaatgcgttcaacatggtcgatggtatcgacggcctgctcggcggactgtcatcggtctcttttgcggcgaccgggattatcctttggtttgatggtcagtacagcctggcgatgtggtgtttcgcgatgatcgccgccattctaccctatattcttctcaatcttggcgccctcggccgccgctataaagtctttatgggtgacgccggcagcacgatgattggcttcaccatcatctggatcctgctggaaaccacgcaaggtaaaacgcatcccattagcccggtgaccgcgctgtggattatcgctatcccgctgatggacatggtggcgattatgtatcgccgcctgcgcaaaggcatgagtcctttctcaccggaccgtcagcatattcatcatttgatcatgcgcgccgggtttacttcccgccaggcgtttgtcctgattaccctggccgccgccctgctggcgctggttggcgtcgtggcggaatacacccgcattgtgccggaatgggtgatgttaattctctttttggtagccttctttctttatggctactgtattaagcgcgcctggaaagtggcgcgcctggttaagcgcatcagacgcagaattcggcgacacagcggcaataatccgaaactaaccaagtagagctggggatgtgatgactcaaccattaccgggagcacaagcagtgaacgttgagaacgagctggatattcgcgggctgtttcgcgctttatgggcaggaaaaggctggatagtcggcggcgccgtactcttcgccgccatcgtgctggtgtacaccttctttgctcgccaggagtggagcgccacggcgatcaccgatcggcctactgtcaatatgttggggggatactattcccaacagcagttcttacgcaatctggacattaaagccgacctcgcctcggtcgaccagccttccgccatggatgaagcgtataaagagttcatcatgcagctggcctcctgggatacccggcgcgatttctggctgcaaacggactactacaagcagcgtcagtcgggtaatgcccgcgctgatgcggcgatgctggatgacctgattaacaatatccagtttatgccaggcgatgcggccaagagcattaacgacagcgtcaaactgaccgccgagaccgggcaggatgccaataatctgttgcgtcagtatgtggccttcgccagccagcgggcggcaggccatcttaacgacgaacttaaaggcgcctgggcggcgcggacggtgcagatgaaggcgcaggtgaagcgccaggaagaggtggccgaggccatcttcaaccgccggacgcacagcgtggagcaggcgctgaaggtggctcagcagcacaatatttcacgtagcgaaacggatgttcctgccgatcagttgccggattcagagctatttttattgggcaggccgatgctgcaggccaggctggaaaacctgcaggccgttgggccggaatatgacctcgattacgaccagaaccgcgccatgctgagcacgttgaacgtcggtccaacgttagatccgcgttttcagacttaccggtatttgcggacgccagaagaacctgtaaaacgcgatagcccgcgccgtgtatttctgatggtgatgtgggggattgtgggtgcgctcatcggcgcaggcgtggcgttatcgcgtcgtcgtgtcctgtgattgcggcctgtggtgaagggcagatgaccttcatcgcctaatcgaagagaatcgatgtgaaagtactaactgtatttggcacgaggccggaagccatcaagatggcgcctctggtccatgcgctggcaaaggatcctcattttgaggcgaaagtatgcgtgaccgcgcagcatcgggagatgctcgatcaggtgttgaaacttttctctattgtcccggactacgatctcaacatcatgaagccggggcaggggctgaccgagatcacctgtcgcatccttgaagggctgaagccggtgctggagtcgtttaaacccgacgtggtgctggtgcatggcgataccaccaccaccatggcggcgagcctggcggcgttttaccagcggataccggtgggtcacgtagaggccggcctgcgcaccggcgatttaagttcgccgtggccggaagaaggcaaccgtacgttgaccggccatctggcgacataccatttcgcccccacggaaacctcgcggcagaacctgctgcgggaaaatattgccgacagtcggatcacggttaccgggaatacggtcattgacgccctgttctgggtgcgggatcgggtgctgggtgatgaagcgctacgggagaccctgctgcagcgctatcctttcatcagccacggtaaaaagatgattctggttaccggccaccggcgggaaagctttgggctcggttttgaacagatctgccaggcgctggccgagatagcccatacccaccctgaggtgcagattgtctatccggttcacctgaatcctaatgtcagcgagccggtgaatcgtattcttggtcatattgacaatgtgatgttgattgaaccgcaggattacctgccgttcgtctggctgatggatcgcgcctggctgatcctgaccgattccggcggcattcaggaagaggccccctcgctgggtaagccggtgctggtcatgcgcgatatgaccgaacgtccggaagcggtggccgccggcaccgtgtgtctggtgggcaccgacagccagcgcatcgtcgcggaagtgacgcgactgctggaggatgatgctgcataccaggcgatgagccgcgcgcataatccctatggcgatggcgaagcatgtcgtcgcattttgtctgcacttaaaaataatcaggtaacgctatgagtttttctaccatttcagtgattggccttggctatatcgggctgccaaccgctgccgcgttcgcctcccggcagaagcgggtggtcggcgttgatgttaatcaacatgccgtggagaccattaaccgtggagagattcatatcgtggagccagatctggcgagcgtggtgaagaccgcggtcgagcaggggtatttaagcgccaccaccactccggtggaggcggatgcttacctgattgccgtgccgacgccgtttaaagatcgccacgagccggatatggtgtttgtcgagtcggccgccaaatccattgcgccgacgttaaagaaagggtcgctggtgatcctcgagtccacttcgccggtcgggtcgaccgaacagatggccgagtggctggcggagatgcgcccggatcttagcttcccccagcaggtgggtgaagcggcggacgtgaatatcgcctactgcccggagcgggtattgcccggtcaggtgatggtcgagctgattaaaaacgaccgcgttatcggcggcatgtcgccggtctgctccgctcgcgccagcgagctgtataaaatcttccttgaaggcgaatgcgtgatgaccaactcgcgcaccgccgagatgtgcaagctgacggaaaacagcttccgcgacgtcaacatcgcttttgccaacgagctgtcgctgatttgcgccgaccaggggattaacgtctgggagctgatccgcctggcgaaccgccatccgcgcgtcaatatcctgcagccgggcccgggtgttggcggccactgtatcgccgtcgacccatggtttatcgtggcgcaaaacccgcagcaggcgcgtctgatccgcaccgctcgcgaggtcaacgaccacaagccggaatgggttatcgaacaggtgaaagcgcaggtggcggactgcctgaatgccaccaacaagcgggccagcgaactgacgatcgcctgttttggcctcgcttttaaaccgaatattgacgacctgcgcgaaagtccggcgatggaaattgccgcgcagattgcccgctggcacagcggcacgacccaggtggttgagcccaacattcacgcgctgccgaagaaactcgatggactgtgtacgctggcgacccttgaggcggcgctggccagcgccgatgtgctggtgatgttggtcgatcataaccaatttaaagccgttagcggcgatagcgtcacccaggcgtttatcgtcgacaccaaaggagtgtggcggtgagaaccattctggtcaccggcggcgcgggcttcattggttcggcggtagtgcgggagattatccagcacaccgccgatcgcgtggtggtggtggataaactgacctacgccggcaatttaatgtcgctggcgccggtggcgcaggatgcgcgtttcgcctttgaacaggtggatatctgcgaccgcgccgagctggatcgcatttttcgtcagcatcaaccggatacggtgatgcacctggcggcggaaagccatgtcgatcgttcgattgacggcccggcggcgtttatcgagaccaatatcgtgggcacctatacgctgctggaggcggcccgtagctggtggaataccctggctatggcgcaaaaatcggcgtttcgcttccatcacatctccaccgatgaagtgtatggcgatctgcacggcagcgatgatttctttaccgagaccacgccctatgcgccaagcagcccctattcggcttcgaaagccagcagcgaccacctggtgcgcgcctggctgcgaacctatggcctgccgacgcttatcaccaactgctcaaataactacggcccgtatcactttcccgagaagctgatcccgctgacgatccttaacgcgctggcgggcaagccgctgccggtgtatggcaatggacaacagatccgcgactggctgtacgtggaagatcacgccagagcgctgtatctggtggcgacccgcggcgaaccgggcgaaacttacaatatcggcggtcataacgaacgtaaaaatatcgaggtggtggaaaccatttgtcagctgctggaagagctggcgccggataagccgcagggcgtggcgcactatcgcgatctgatcgccttcgttgccgatcgtccgggccacgatctgcgctatgccattgatgcctcgaagattgcccgcgagctgggctggacgccggcagagactttcacctccggtatgcgtaagaccgtggcgtggtatctggcgaacgaggcctggtggcgtcaggttcaggacggaagctatcagggcgagcgtcttgggctgcaaagctaatcatctctggggggaatgatgaaaggtattattctggcaggcggttccggaacgcggctacatcccatcacccgcggcgtatcgaagcagctgttgccgatctacgataagccgatgatctactacccgctgtcggtattaatgctggccgggatccgtgagatcctgattatcaccacgccggacgacctacgtgatttccagcgcctgctcggcgatggctcagagtttggcattgcgctgcactatgccgtacagccgacgccggatggtttagcccaggcgtttatcatcggagaagcctttcttaacggcgaaccggcgtgtctggtgttaggcgacaatatcttcttcggccaaagctttagcccgaagctgcgcagcgtcgctgcccgcacggaaggggcgacgatttttggctatcaggtgatggatcctgagcgctttggcgtggtggagtttgatgataacttccgtgcgctatcgctggaagagaagccgaagcagccgaagtcgaactgggcggtcaccggtctctatttctacgatggcaaggtgacggagtatgccaaacgggtcaaaccatccgagcgcggcgagctggaaatcacctccatcaaccagatgtatctggaggatggcgcattgaccgtcgaactgcttggacgcggctttgcctggctggacaccggcacccacgatagcctgatcgaggccagcatgttcgtgcagaccgtcgagaagcgccagggctttaaaatcgcctgtctggaagagatcggctggcgtaacggctggctggacgacgacggcgtcaaacgtgcggcgaagcggctggaaaaaaccggctacggccaatatctgctggatctgctccgtgcccgtccgcgccagtattgaccccctggagtgggagaaccgcttctttgccgtgaacagcgcgatcgtgcgctttgacgagcacgcgccgcggctgacgcctgaggcgctggcggggtggtcgcgagtgcaggcgaagatcgccgccagcgacaccgtccggctggacgcgctgcagcggctgggttttcagctggtggaaggtgaggtcgatctggcgctgccggtgggcagccctgcagatgccggcgcagacgtcgccgtggaagcggatattgcgccgctgcgcgagcaggcggcgcaggcatttgccatgagccgctttcgcgcgccctggtacgctgccgacgccagcggccgcttctatgcccagtggattgaaaatgcggtgcgcggcaccttcgatcatcagtgcctgatttaccgccatcctgagggcgatattcgcgcctttgtctccctgcggcagatcactgcgaccgaagcgcgtatcggcctgctggccggacgcggcgccggggcgcagttgatgcaggcggcgcggtactgggccgcctcgcgcggactttctacactgcgggtggcgacccagatgggcaacaccgccgcgcttaaacgttatattctcagcggtgctaacgtggaaagcaccgcctactggctatacaggtgacccccatgatcccatttaacgcgccgccggtggttggaaccgagcttgattacatgcagtctgcgatgaacagcggcaagctgtgcggcgacggcggctttacgcgccgctgccagcagtggatggagcagcgatttggcacggcaaaagcgctactgaccccttcctgcacggcttcgctggagatggccgcgctgctgctggatatccagccgggcgacgaagtgattatgcccagctatacctttgtctccaccgccaacgcctttgtgctgcgcggggcgaaaatcgtcttcgttgatatccgtcgcgatacgatgaatatcgacgaaacgctcatcgaagccgccatcaccgataaaacccgggcgattgtcccggtgcattatgccggcgtagcctgcgagatggacaccatcatggccatcgccgacaaatacaacctgtttgtggtggaagacgccgcacagggggtgatgtccacctacaaggggcgcgcgctgggcaccatcggccatatcggctgcttcagcttccatgaaaccaaaaactacaccgccggcggtgagggcggggcgacgctgatcaacgatcgcacgctggtggaacgcgcggagattattcgcgaaaaaggcaccaaccgcagccagttctttcgcggcctggtggataaatatacctggcgggacattggctccagctatctgatgtccgacctgcaggccgcctatctgtgggcgcagctggaagcggcggagcgcatcaaccagcagcgcctggccctgtggcagaactactatgatgcgctgctgccgctggcgcgcgccgggcgtatcgaactgccgacggttccggccgactgcgggcaaaacgcgcacatgttctacattaagctgcgtgatatcgaggatcgcagcagactgatcgcctggctgaaagaggcggagatcctcgcggtattccattacattcccctgcacagctgcccggcaggcgaacagttcggcgaattccgcggtgaagaccgctacaccactcaggagagcgagcgtctggtacgcctgccgctgttttacaatctgtctgtggtgaaccagcggacggtgattaactcgctgctgagctacttctcctgatatgtcgttagcaaaagcctcactgtggacggcggcatcgacgctggtcaaaatcggcgccggtctgctggtcgtcaagctgctggccgtctcgtttgggccggcgggcgttggccaggccggtaacttccggcaactggtcaccgtactcggcgtgctggccggggccgggatatttaatggcgtcacgaagctggtggcgcagcatcacgacgatcccccgcgcctgaagcaggtggtgggcacctcgtcggcgatggtgcttggcttttccaccctgctggcgctggtatttttactggcggcggcgccgataagccaggggctgttcggccatacgcactatcaggggctggtacgcctggtggcgctggtgcagatggggatcgcctgggcgaatttcctgctggcgctgatgaaaggctttcgcgatgcggcgggtaacgccttctcgctgattgccgggagcctgatcggcgtggcggcttactatgcttgctacgtgttgggaggctatcagggcgcgctgctggggctggcgttagttccagcgctggtggtggtcccggcgggtattatgctctggcggcggggtaatatcccgctgagcgccctgcgtccgcgctgggataacggcctggcgggtcagctatcgaaatttaccctgatggcgctgataacctcagtgaccctgccggtagcctatgtgatgatgcgtaatctgctggcggcacattatggctgggaggcggtcgggatctggcagggggtgagcagcatctccgatgcctacctgcagtttattaccgcctcgtttagcgtctatctgctgccgacgctgtcgcggctgagcgccaaaacggatatcacccgcgagatagtcaagtcgctgaaattcgtcctgccggcagtagcggcggcgagcctgacggtctggctgctgcgcgattttgccatctggctgctgttttccgatcgctttaccgcgatgcgtgacctgttcgcctggcagctggtgggcgacgttttaaaagtaggcgcctacgtctatggctatctggtgatcgccaaagcgtcgctgcgtttttatattctgacggaaatcagccagttcgcactgctgaccgcattctcacactggcttataccggcgcacggcgcggttggcgcggcgcaggcatatatggccacttatattgtttatttcgccctttgtagtggcgtgtttttactctggcgtaaacgggcatgacagcactgatacatgtactgggatcggatatcccgcatcataaccagaccgtactgcggttctttaacgacgaactggccgccgacccgcaggccaggagatttatgatcgtcggtgatgaggccagcgtgcgtgatgggtatccggcgctggacatcacctgttatccggggaaaaaggcgctggcgcaggcagtgattgctaccgcgaaagccaaccgccagcagcgctttttcttccacggccagttcaataccgggctgtggctggcgctgttgagcggtggcatccgcccgtcgcagtttaactggcatatctggggggcggatctgtatgaaaattctgccagcctgaagtttcgcctgttctatccgctgcgccgtatggcgcaggggcgggtagggcgcgttttcgccacccgcggcgatctcagctggttcgctaaccgccatccgcgcgtcccgggcgagctgctctacttcccgacccgtatggatccggcgctgaataccctggccgataacgatccgcgcggtgataccctgactattctggtgggcaactccggggatcgcagcaatgaacatattgccgcgctgaaggcaatccatcagcagtttggcgatacggtaaacgtcatcgtgccgatgggctatccagcgaaaaacgacgcctatatcaatgaggttcgcgaggcgggggcggcgctgtttagcggtgagcatctgcagatcctcagcgagaagctggagtttcatgattatctggcgctgctgcgccgctgcgatctgggctattttctgtttgcccgccagcaggggatcggcaccctgtgtctgctgattcaggcgggcatcccctgcgtgctcaatcgggaaaacccgttctggcaggatatggccgagcagcatgtgccggtgctgttcaccagcgacgcgctggacgtcagcgtggtgcgcgaagcgcagcgtcagctggcgagcgtggataaatccgctatcgccttcttccggccgaactatctgacgggctggcagcgggcgctacggttagcggcggaggggcaggcatgacgttaatgcaatttagcgggctgctggtggtctggctgctgtcgacgctgttcatcgccaccgccacctggtttgagttccgtcgggtacgctttaacttcaacgtttttttctcgttgctgtttctgctgacctttttcttcggcttcccgctgaccagtattctggtgttccgctttgacgtcagcgtggcgccgccggagattttgctgcagacgctgctgatcgcggtgtgcttctacgcagtctactacgtgacctataaaacgcggctgcgttcggcatcgcgtgaggttgcgcatcgcccgctgtttaccatgaaccgggtggaaacccatctggcgtggggcattttgatggggctggcgctgctgtgcgtcggcatcttcttcgcccacaacggtttcctgctgtttaagctcaactcctacagccagattttctctgctgaagtgtccggcgtggcgttgaagcgcttcttttacttctttattccggcgatgctggtggtctattttctgcgccaggattataaggcgtggatcttcttcctcgtcagcacggtggcctttggtttgctgacctacgccatcgtcggcgggacgcgcgccaatattatcatcgccttcgccatctttctgttcatcggtattattcgcggctggatcagcctgtggatgctggctgcggcgggtgtgctgggtattgtcggcatgttctggctggcgctgaagcgctacgggatgaacgtcagcggcgacgaagcgttttatacctttctgtatctcacgcgcgacaccttctcaccgtgggagaacctggcgctgctgctgcagaactacgacaagatcgatttccaggggctggcgccgatgatccgcgatttctacgtctttatccccagctggctgtggcacggtcgcccgacgatggtgctcaataccgccaactactttacctgggaagtattaaacaaccattcggggctggcgatttcgccgacgctgattggctcgctggtggtgatgggcggcgtctggttcgtaccgctgggcgccgtggcggtagggttgattattaaatggttcgactggctgtatgagctgggcaaccgggagagcaatcgctataaagcggctatcctgcacagtttctgtttcggcgctatcttcaacatgatagtgctggcgcgcgaggggctggattcgttcggctcccgcgtggtgtttttcctcgtgatctttggtatctgcttgctggcggcgaaactgctgtactggttcctggatagcgtgggactgattcataagcgcgtaaaaccgctttcgcaaccgcaagtctgagaaggatggacatgactgggaccatttccgcgccgttgtacctgttaagagggctgcagctcataggctggcgcgatatgccgcacgctctggattatttgtttgccgacggcgcgctccgggaggggacgctggtggccattaatgctgagaaaatgctggccgtagaagataacccggaggtacgggcgctgattgaggcggcggagtttaaatatgccgatggcatcagcgtggtgcgttcgctgcgcaaaaaatacccgcaggcccaggtatcccgcgtcgccggggccgatctctgggaagcgttaatgcagcgcgctggcgctgaagggacaccggtgtttttggttggtggtaaacctgaggtcctggcgcagacagaatccaggctgcgtcagcgctggcaggtgaacatcgtcggcagccaggacggttatttcacccctgagcaacgccaggcattgttcgaacgcattcgcgacagcggggcgaaaatcgtcaccgtcgcgatggggtcgccgcgccaggagatctttatgcgcgactgccggcgcctgtatccgcacgcgctgtatatgggcgtcggcggcacttacgatgtttttaccgggcacgtccatcgggcgccgaagttctggcaggatctggggctggagtggttctatcgcctgcttttgcagccgagccgcatcaagagacagttccgtctgctgcgctatttacgttggcattattccggtaagctctgatattccactgtaaccaggcgagtttgcatacatattctgtgtaatctcttcactcgcctgatactttatttgccatttccgcaaaattaattaaccattcgcaggcttcatacgcgccggggagacctgcgcgtcggcaaggctatggtttcagttaataacaataaccgggagtacccggaatacggcaaacacaagaggatatatgactgagaaaaaagcggagctccagcgtggactggaggcccggcatattgaactgatcgcccttggcgggacgattggcgtggggttgtttatgggggcggccagtaccttgaaatgggctgggccttccgtgctgctggcgtatattatcgctggcctgttcgtctttttcattatgcgctcaatgggcgaaatgctgttccttgagcctgtcactggctccttcgcggtgtatgcgcatcgctatatgagccccttcttcggctatctgaccgcgtggtcctactggtttatgtggatggcggtggggatctcggagattaccgccatcggggtctatgtgcagttctggttcccggagatggcgcagtggatcccggcgttaattgctgtgggactggtggcgctggcgaaccttgcggcggtccggctatacggtgaaatcgagttctggttcgccatgataaaagtgaccaccattatcgtgatgatcgtcgtgggtctgggcgtcattttcttcggctttggcaacggcggccactccatcggttttggtaatctcaccgaacatggtggtttctttgctggcggctggaagggcttcctgacggcgctgtgtatcgtggtcgcgtcctatcagggggtggagctcatcggcattaccgcaggtgaagcgaaaaacccgcaggtgacgctgcgcagcgcggtgggcaaagtgctgtggcggatcctgattttctacgtcggcgcgatttttgttatcgtcactatcttcccgtgggatcaaatcggctccaacggcagcccgttcgtactgacgtttgccaagatcggtattaccgcggcggcgggaattatcaacttcgtggtgctgacggcagcgctttccggctgcaacagcggaatgtacagctgcggacgtatgctgtacgccctggcgaagaaccgtcagctgccggcggcgatcggtaaggtatcgcgcaacggcgttccgtccgtcggtgtggcgctgtcgattctgatcctgctggtgggctcctgcctgaattacattattcctaatccgcagcgggtgttcgtctatgtctatagcgccagcgtcctgccggggatggtgccctggtttgtgatcctgattagtcagctgcgtttccgtcgcgtgcatcaggcggcgattgccagccatccgttccgttcgctgctgtttccgtgggccaactatttcacgatggccttcctgatctgcgtgctggtcgggatgggactgaatgatgaaacccggatgtcgctcttcgtcggcattatttttctggccgccgtcaccctgatttataaggtgtttggcctcggaagacaggggtaagtcaataatacggctgaataaccgtcaaaacgaacaaagcatgagcaaacgataattttctttaaaaaggcactagacagcggggtaggaagtccgtattatccgaccccgcaacggcgctaagcgcccgtagctcagctggatagagcgctgccctccggaggcagaggtctcaggttcgaatcctgtcgggcgcaccattaacccggtgctggagctgcggtggttttaataccgcgtaaaaggtttgcagtggtggctatagctcagttggtagagccctggattgtgattccagttgtcgtgggttcgaatcccattagccaccccattatttgatagagttgtgaatttgcgaaggtggcggaattggtagacgcgctagcttcaggtgttagtgttcttacggacgtgggggttcaagtcccccccctcgcaccacgactttaacgaattgaactaaaaattcaaaaagcagtatttcggcgagtagcgcagcttggtagcgcaactggtttgggaccagtgggtcggaggttcgaatcctctctcgccgaccaattttgaaccccgcttcggcggggttttttgttttctgctgccgtccgccatctcttatttctctgatcttgctgataaaaaatcttctctttgcttaagaatacgcgtcaggaaaactctcaattcatcactgtggtagatgcaatttccccggatcctgtgcgataataaccgggtagatgctcattccatctcttatgttcgccttcgtgcctcataaactccggaatgatgcagagccgttcttacggtgcttatcgtccactgacagatgtcgcatttatgcctcatcaaacaccatggacattacgttgagtgaagcacccaatttgttgtcaaacagacctgttttaacgcctgccctgatttcagcgcaggcgtttttttctttcagggatccgtcaatgtgaaggcgggggagaagggctatcgccccgcaggaggcgatagccatgccaggttatggctgaggattattctgcagcgtcagcagcagtccatcgcggcgcatagcggcggcttcttccggctgatgcaggcggtccagggcatccgccagccaggcgtaatcaaaggcatccggacgctgcttaagcgcggcgcggaaggcgatgctggcctcctgccattcgccgtgccgcatcagcgactggcccagggtgctccacagcagcggacggtcgccaacggctttgatctgctggcgcagcactttctcaagctgttccgggttattggtcttcagacgcgggatcggcatcaccagacggtcatcatactgtttcttcagaccatcaatgataatttgctgcgcggtatcgtgatcgtcgctctcgatgaggcgctcggccatcgccacctgcagcggcaccatcgcccgcgttttacggctctggttgcgccaccattcgcgtagtccttcgctgccgccatcggccagcgctttatccatcaggccaacccaggccagctgttccagcgccgcgcggtgcgcttcatcgccgacgttagctttcgccatcgacggaatgatgtccagcagcgactgccaggcgccggtgcgggtgtatgcctgttcggcgaggcgcagcacttccggatgacgcggggtaatttccagcagcttatcgatgccatggcgcgcagcgtgattttcattacgcgccagctgcaggcgaacgcgagtgatttccaccgggatcaggtcatcgcccgccagctcggtggcgcgctccagatgctggttggcccgcgcttcatcgccgcgctgctgggccgcttccgccgccagcagatagttcaccaccggctgttcggcgtgatcggcatttttcgccatcagcttctcaacctgctggtaatcaccttccgccagcttaagcagcgcctgctcggtttgcttacgcgcgcgacggcgtttacggccgacaaaccagccgcgcgtatgcgccccggtgcggaaaatgcggcgcagcagccattcgatggcgaacagcaccaccatggcgaggatcaggatgatcaccagcccggtcacgctggtctcgatattgtaattatcggtctggatcaggacgtagccctgatgcccggcgatcatcgggccaagcacgatcccggcgatcaacagtgcgaagagtaaaagaattttcagcatgcgttactctccttgcggcgcagcgggggcggccggcgcagcaggtgcgggcgaaggcgcgccgcccgcggtaacggcaggctgcgccatcaggttgcgcactcgggtctgcatcagtttttccagcaacgcctgactctgcagcgtttccggcaccgtcatggtaatgctttgctgactgagcttatccacctcgtcgaggaaggctttggtggtggcgtcatcggtatcataataggcgcgtacccaggtcgagacgttatccagcgactgtttccaggtctcttcctgatggcgcggaactgcctgcgcggcgaccagcaggcgagagcgaatattttcccgcagatagatatcctgattcggcgccagcagcgggaccgccgtttcatcgcggcggcgcacggtgataaagctgtccataaagttctgccagcttttctgcaggttgacgcgccattcgctgatagagctggaaagctcatcgctatcagcgtccatcggcgaatcgtcatcgttattatcggccagccgcaggttatcgatttggttcgccagctgattaaccttgaggatcatgccgtcatagtccacctggcttaccgcggagagggtggcgatgtcgtcggtgatcgcccggcgggcgccgatgaggcttgggtcgttcatgtcggcgaggctggcgtcagcgcttttcagcagcgcggcggcggtggtgacatcctgatcgctccacagcttacgtcccgccagcttgacgaggaagtcggcctgggccagcagccaggttttggcatcgctaccggaaatcaccgccactttttgctgcagctcatccaactgtttggccagcgtctcctgctgatgtttggcttcgtttagctggtcggcctgctgtttgataacaccttccagtttacttttttgattttcctgcgctttttgcagcgccgcgacctggcttgctaattcagaggtagttgcgttttgccgcgtggcctgttgtttgttcaggccatacaggccgatgccggcggctatcgcaatggcgatagcgatcgcgctgagcgccaggctggttttattgcctgccttcttcttctcagtgttctctggctgtggtgtggtctccacggcctccctggtctcttcaaccacggcggattgattttgttgttccgtcattatggcttccaatgttgagagttattgtaatgcgcgtagcagcgcatcgttgtcggcgctatcggcaacctgaatctcctgccagcccagttcccgggcctgaagggccagacgttcgctgacaacgacaacgcggcagtgcaggagccactgttcgcgataccattgcggtattaacgaccatagctgctgcagcatctcgccgctggtgaccaccagcgtggtgactccgcgagattgccagcgcatcgcttcttctgcgccatcgtaatgttttgcactacgttgataacattcacaaaatgtgaccctggcgccgcgctcggtcagcgttgcgcctaagagttcccgcccgccattgccgcgtaggatcagcgcatttttcccggcaatgttttgtaattcaggtaattgtagcaagacttcgctaatttcccgatctaacgggtaatggatatgctgcccactgaccgtatgcagggccagcgccgtcgtgcggccaatggcaaaatagcgcggagaagtgggccagggcaggccctgctgctgcagacgggcatgggcgaattccaccgcatgctgggatagcgcaaatagcagatcgtcgggccccagtcgggcaagcgcatcgcccagcgcgggaagctccctgccaggcgtaaattctatcagcggaaagctccaggccacgcgtcccatggcccgcagacggctgaccagcgcttctccttgcggtagtggacgagtgaccaggatgctcatcgcggggcttctccatcataaaccgccgcgagaatctcgcgggcgccattatccagaagctcttccgccagcgagatgccgagggcttccgcttgttccgctggcccgcgtcgttcgccgcgcaccagctgtgaaccatccggagcgccaaccagcgcccgcagccacagttccccgtccttcagttccgcatagctgccgatcggcacctggcagccgccttcgaggcgggtgttcatcgcccgctcggcgcgcacgcgcaccgccgtttccgtatggttgagaggcgctaacagcccccgggtccatgcatcatcaagacggcattcgatgccgaccgcgccctggccgaccgccggcagagattgctcaggcgacagcggctggcgaatacgcgcttccagctgcaggcgcttcaggccggcggcggcgaggatgatggcgtcgtactcgccgttatccagcttactcagccgggtaccgacgttaccgcgcagagagcggatcgccaggtccggacgggtggcggccagctggcactgacggcgtaaacttgacgtgccaacgacgctgccggccggcagttcgtcaatcgaggcatagcgattggagacaaacgcgtcgcgcggatcgtcgcgctcgcagatagtcaccagccccaggccctccgggaattccaccggcacatctttcatcgaatggacggcgatatcggcgcgcccttcgagcatggcgagctctaactctttcacaaataagccttttccccccacctttgccagcggagtatcaaggatgacatccccgcgcgtgaccatcggcaccagctcgaccttcagtccgggatgcgcttgttccaggcgcgctttaacatactgcgcctgccatagcgcaagcgggctttgccgtgtggcaattttcaaaactttgtctaacatgcttgttaccgtcattatcgaccactatccatcctaacattgttgtcttacggatgttagttttcacggtttatgtgggaggtggctccggcccactcttttttaacctttcatgcgcgtggcggttgccggaggcgtagtgaggaatttacaggtaataaacggtgctacacttgtatgtagcgcatctttctttacggtcaatgagcaaggtgttaaattgatcacgttttaaaccatttgtcagtccgctgctcatcacaaccacaccgacgacgaatggtgacggtttttgttgaaatactgaaatcctccgtactattgtacctcgggtttttgaacatcaggcgatatgtcttgtacctctatattgagacactgaaacagagactggatgccatcaaccaattgcgcgtggatcgcgcgcttgctgccatgggacccgctttccagcaggtttacagtctactgccaacgttattacattatcatcacccgctgatgccgggttaccttgacggtaacgttccccgtggcatttgcctctacacgcctgatgaaacccaacgccactatcttgaagaactggaactgcatcgcggtatgcagactcaggagccgccgaaaggcgagctgccgatcaccggcgtctactcgatgggcagtacttcctccgtcggccagagctgctcttccgatcttgatatctgggtatgtcaccaggcctggctggatagcgaagagcgtcagctgctgcagcgaaaatgcagcctgcttgagagctgggctgcctcgctcggcgtggaagtcagcttcttcctgatcgacgaaaaccgtttccgtcataacgaaagcggtagcctcggcggcgaagactgcggttcgacccagcatatcctgttgcttgatgagttctaccgcaccgctgtgcgcctcgccggcaagcgtattctgtggaatatggtgccgtgcgatgaagaagagcattacgatgattacgtgatggggctgtatgcccagggcgtgctgacgcctaacgaatggctcgatctcggcggcctcagttcgctgtcggcggaagagtacttcggcgccagcctgtggcagctgtataaaagtatcgactccccctataaagcggtgctgaaaacgctgctgctggaagcctactcctgggaataccccaataaccgcctgttagcgaaagatatcaaacagcgtctgcacgacggggagattgtctccttcggcctcgacccgtactgcatgatgctggagcgcgtgaccacctatctgcaggccatcgaagatgaaacccgcctcgatctggtgcgccgctgcttctacctgaaagtttgtgaaaaactcagccgcgaacgcgcctgcgtcggctggcgtcgcgaagtcgtcagccagttggtgaatgcctggggctgggacgaaaagcgtctgatgatgctcgacaaccgcgccaactggaaaatcgatgaagtgcgcaaggcgcacaacgaactgctcgacgccatgatgcagagctatcgtaatctgatccgcttcgcgcggcgcaataaccttagcgtctccgccagcccgcaggatattggcgtgctgacccgtaagctgtatgcggcctttgaagcgctgccggggaaagtgacgctggtaaacccgcaaatttcgccggatctgtcggaaccgaacctgacctttatccacgtgccgccgggccgcgccaaccgtaccggttggtatctgtacaaccgcgcgccggacatggaatcgatcatcagccatcagccgctggaatataaccgttatcttaataagctggtggcctgggcctggtttaacggcctgctgacctcacgcacccgcctgtttattaagggcaacggcatcgtcgatctggcgaagctgcaggagatggtggccgacgtgtcgcaccacttcccgctgcgcctgccggcgccgacgccaaaggcgctgtacagcccgtgcgaaatccgccacctggcgattatcgtcaacctcgaatatgacccaaccgcggccttccgcaaccaggtggtgcacttcgatttccgtaaactggatgttttcagcttcggcgaagagcaaaaatgcctgatcggcagcgtcgacctgctgtatcgcaactcgtggaacgaagtgcgtacgctgcactttaacggcgaacaggcgatgatcgaggcgctgaaaacgatcctcggcaaaatgcaccaggacgccgcgccgccggacagcgtggaggtgttctgctatagtcagcacctgcgcggcctgatccgcacccgcgtgcagcagatgatctccgaatgtatcgaactgcgtctctccagtacccgccaggataccgggcgtttcaaagcgctgcgcgtctccggccagacgtgggggctgttcttcgaacgtcttaacgtttcggtgcagaagctggaaaacgccattgagttctacggcgctatctcgcacaacaagctgcacgggctatcggtgcaggtggaaaccaatcacgttaagctgccggcggtggtggatggcttcgccagcgaagggattattcagttcttctttgaagacgcggataataacgacagcggctttaacatctatattcttgatgagagcaaccgcgccgaggtctatcatcactgcgagggcagtaaagaggagctggtgcgcgacgtcagccgcttctattcgtcatcgcacgatcgtttcacctacggctccagctttatcaacttcaacctgccgcagttctatcagattgtcgaggtagacgggcgcacccaggtgatccctttccgcacccaggcgattgccgccgcgatacccaccagccaggacgttaccgcctcgccggtgctgcagcagcgctactcgtagatttggcccggataaggcgcgatgcgccgctatccgggaaacacgtcattaacggaatttcaccgtctcaccggcctgctggctcgccgcctgctccagcagatcccagaaggtttcgccgctgcgatcgcagatccactcgtcgcctttgagatcgaagtgatagccgccctgtttggtggccagccacacctggtgcagcggctcctgacggttaataatgattttgctgccgttttcaaagctgatggtcagcacgccgccgttgatttcgcagtcgatgtcgctatcgccgtcccagtcgtccagacgttcttcgatggtcatccacaggctatcggccaggcgatggaattcactgtcgttcataatttgattctgcttttttgatttttgaagatgggtcgcagtatagcgcgaaacaaaagcgcgcgcagtcggatgctaaaggcttgcttttacgtcttctcctgcgatgatagaaagcagaaagaatgaatcacgggcaactatcaatgaaaaacgtttttcctacgcttgccgttttgtttgcgatcttcagcctgaccggctgcggtctgaaagggcctctctatttcccaccggcggacaaaaccgcgccgccgccgaccaaaccggttaaccctggcattcagagcgcaacgccggatcgaaacgatcgtggcgataccggtggtccgagccaggtcaattactaacgataacgttctgttccgcgcaactggagtagatgatgcagttctctaaaatgcatggccttggcaacgattttatggtcgttgacgcggtaacgcagaatgtttttttctcgccggagctgattcgccgcctggcggatcgccaccttggcgtcgggttcgatcagctattggtcgtcgaaccgccctacgatccggatctggatttccactaccggatctttaacgccgacggcagcgatgtgtcgcagtgcggcaacggcgcgcgctgttttgcccgcttcgtccggctgaaaggcctgaccaataaacgtgatatccgcgtgagtacggccaacgggcgtatggtattaagcgtaacggaagacgatctggtgcgggtgaacatgggcgagcccaacttcgagccgtcccaggtgccgttccgcgccaacaaagcggaaaagacctatatcatgcgtgccgccgagcagacagtattgtgcggcgtggtgtccatgggaaatccgcactgcgtcatccaggttgatgatgtggatacggcggcggtggaaactctcggcccggtgatggaaagccatgagcgttttccggagcgcgccaatatcggctttatgcaggtggtcggccggtctcatatccgtctgcgcgtctacgaacgcggcgcgggggaaacccaggcctgcggcagcggcgcttgcgccgcggtggcggtggggatccagcaggggctgctggcggaaacggtacgcgtggaattacccggcggtcgtcttgatatcgcctggaaaggcccgggccagccgctgtttatgaccggcccggcggcccatgtctatgatggatttattcatttatgaaaccaatcggggaagaacagcaggaggttgccagcgcgttgaacgatcgcgcagtggtggactatctgttgcaacatcctgaattttttattcgtaatgccgcccaggtcgaacatctccgcgtcccgcatccggtacgcggtacgatttcgctggtggagtggcacatgatgcgggcgcgtaaccatattcatgtgctggaagaaaatatgtcgctgctgatggagcaggcggtcgctaatgaaagcctgttccagcgcctgctgcagctgcaaacgcggctggcggcggcggagagccttgacgatatgctcaaccgccttcaccgctgggcacgcgagctggggctggcgggcgccacggtgcgcctgtttcctgactgctggcgcctcggcgcgccctcgaagtttacccatctggcattaaaccggcaggcgtttgagccgatccgtattcaacgtctgggccaggcgcgccactatcttgggccgctgaacggcccggagctgctggtggtgctgccggaggcgaaggccattgggtctgtggcgatatcgctgctggggggcgataatgccccgggggtgatgctcttcagcagccgcgatgcgcagcattatcagccagggcaggggacgcagctgttgcaggagattgcccagatgctgcccggcctgctggagcgctggattgaacgcgcatgaccgattctcctctcttctccgccgtcgcccgctttcttcgccatcttggcgttgaacgccagctcagcccgatcacgttactgaattaccagcgacagctggacgcgctgatcgccctggcggatgaggcgggcctgaaaagctggtcgcagtgcgatgccgctcaggtgcgaagctttgcggtgcgtagtcgccgcgcggggttaggcccggcaagcctggcgcttcgcctgtcggcgctgcgcagtttcttcgactggctggtcggccagggcgagctcagcgccaatccggcgaaggggattgccgcgccgaaaattccccgccacctgccaaaaaatattgacgtcgatgacgtcaatcgattgctggatatcgatctcaacgatccgctggcggtgcgcgatcgggcgatgctggaggtgatgtacggcgcgggattgcgtttgtccgaactggtcaacctggatatcaaacacctcgatctcgaaagcggtgaggtctgggtgatgggcaaaggcagcaaagagcgccgtttaccgatcggtcgcaacgcggtggcatggattgagcactggctggatttgcgcggcctgttcggtaccgacgacgacgcgctgtttttgtcgaagctgggcaaacgtatttcggcgcgcaacgtacagaagcgattcgccgagtggggcattaggcaggggctgaacagccatgtgcacccgcacaagctgcgccactcctttgccacccatatgctggagtcgagcggcgatctgcgcggcgtgcaggagctgctggggcatgctaacctctccaccacccaaatctatacccatcttgattttcaacaccttgcctcggtgtacgatgccgcgcatccgcgcgctaaacgggggaaataatgcgtttttaccgacctctgggccagatttccgcgctgacgtttgacctggacgataccctttacgataaccgcccggtgattgaccggacgatgcacgagtcgctggcctttgtgcgcagctaccatccttcgctcagccagttcgacgcccatgagcttaatcagctgcgtcagacgctgctggctgctgaacctgagatttatcatgacgtgaccgtctggcgccaccgtgcgctggagttaggtatgcgtaatgccgggctctccgccgaagcggcgaaagcgggggccgatgcggcgatggaacacttcgctcactggcgcagccgcgtcgatgttccgcaggagacccacgatacgctggcgaagctggcggagaagtggccgctggtggccattaccaatggcaacgcccgcccggaactgttcggtctgagcgactatttccgcttcgtgctgcgcgccgggccggatggccgctccaagccgtttgccgacatgtaccaccttgcggcggagcgtctgaatgtgccgctcgggcagattctgcacgtcggcgatgatctgaccaccgacgtggccggcgctattcgctgtgggatgcaggcctgctggatcaaaccgcaaggcgcggacctgatgcacaccgcggacagccgcctgctgccgcatattgaaatttcacggttggcatctctgacctcgctgatataatcaccagtcactctgtatatattaacaggggttcgtggaaccccttctcttccggcggtgccaatggacgtttcttacctgctcgacagccttaatgacaaacagcgtgaagccgtagcggcctcgcgcaccaatatgctggttctggcaggggcgggcagtggtaagacgcgcgttctggtgcaccgtatcgcctggctgctgagcgtggagaactgttccccgtattccattatggcggtgacctttaccaacaaagcggcggcggagatgcgtcaccgtatcggccagctgatgggcaccacccagggcggcatgtgggtgggcaccttccacggcctggcgcaccgtttgctgcgcgcgcaccatctggatgccaacctgccgcaggacttccaaatcctcgacagcgaagaccagctgcgtctgctgaagcgtctgattaaggcgatgaatctcgatgagaaacagtggccgccgcgccaggcgatgtggtacatcaacagccagaaagatgaaggactgcgcccgcatcatattcagagctacggcaacccggtcgagcagacctggcagaaggtctatcaggcctatcaggaagcctgcgaccgcgccgggctggtggacttcgccgagttgctgctgcgcgcccacgagctgtggctgaacaaaccgcatatcctgcagcactaccgcgagcgcttcaccaatatcctcgtcgatgaattccaggataccaacaacattcagtacgcctggatccgcctgctggcgggcgataccggcaaggtgatgatcgtcggcgatgacgatcagtctatctatggctggcgcggcgcgcaggtcgagaacattcagcgcttccttaacgacttccccggcgcggaaaccatccgcctggagcagaactatcgctcgaccagcaatattctcagcgctgccaacgccctgattgaaaacaacaacgggcgcctgggcaaaaagctgtggaccgacggcgccgacggcgagccgatttcgctgtactgcgccttcaacgatctcgacgaagcgcgctttgtggtgaaccgaattaaaacctggcaggagaacggcggcgcgctggagcaatgcgccattctctatcgcagtaacgcccagtcgcgtgtgctggaagaggccctcctgcaggccagcatgccgtaccgtatctacggcggcatgcgcttcttcgagcgtcaggaaatcaaagacgcgctctcttacctgcgccttatcgccaaccgcaacgacgacgcggcctttgagcgcgtagtcaatacgccgacccgcggcattggcgaccgcacgctggacgtggtgcgccagacgtcgcgcgatcgccagctgacgctatggcaggccagtcgcgagctattgaaagaaaaagcgctggccggtcgcgccgccagcgccctgcagcgctttatggagctgattgacgcgctggcgcaggagaccaccgatatgccgctgcacgttcagaccgatcgggtgattaaagactccggcctgcgcgcgatgtacgagcaggagaaaggcgagaagggccagacccgtattgaaaacttagaggagctggtgacggcgacgcgccagttcagctacaacgaagaagatgaagatctgatgccgctgcaggcgttcctctcccacgccgcgctggaagcgggcgaggggcaggcggacacctggcaggacgcggttcagctgatgaccctgcactcggcgaaagggctggagttcccgcaggtgttcatcgtcggcgtcgaagaagggatgttcccgagccagatggcccttgatgaaggcggccgcctggaggaggagcgtcgcctggcctacgtcggcgtaacgcgcgccatgcagaagctgacgctgacctatgcggaaacccgccgtctgtacgggaaagaggtttatcaccgcccgtcgcgctttatcggcgagctgccgcaggagtgcgtagaagaagtgcggctgcgagccacggtgagccgcccggtaaaccatcagcgactgggcgcgccgattgccgagagcgataccggctacaagttaggccagcgcgtacggcatccgaagtttggcgaaggcactattgtcaacctcgaaggcagcggcgagcacagccgactgcaggtggcttttcagggccagggaatcaaatggctggtggcggcttacgcccggctggaggcagtgtaactttaagaaaaatatcattattttgtaatattctgctacctttatacgttaaggcgcctgatttgcgctttcgcgttccgttgcgtgttgacgccgattttgcgctggcgtaacatgcgcgcacgattacgctaagaggacattcgccttggacacacccagtagatgctggctcaacttcctgtcattcaggaacaactcctaaggctatcctcttatgctgatagccttagcggttgtcagcgacctgccccattcccgtcgcgctgagtcaggcttaatggtctgaaacccaatttgtttctgtgtgcccaccgaactgtccgataatttttttgcattgggagtcccggtcatgctgagcgcatttcaactggaaaacaatcgtttaacgcgcctggaagccgatgagatcaaacacctcgccagctcggtgtgggtcgatctggtcgagcctgacgacgatgagcgaagccgcgtgcagacggaactgggtcaaaacctggcgacgcgcccggaactggaagatatcgaagcctccgcgcgtttctttgaagatgaagatgggttacacatccactcgttcttcttttttgaagatgccgacgatcacgccggcaactctaccgtggcgtttaccatccgcgaaggccgcctgttcacgctgcgcgagcgcgaactacccgctttccgcctctaccgtatgcgcgtgcgtaaccagacgctggtcgacggcaacgcctacgaactgctgctcgacctgttcgagaccaaaatcgagcagctggcggatgaaattgaaaacatctacagcgacctggaaaagctgagccgcgtcattatggaaggccatcagggcgacgagtacgacgaagcgctgtcgacgctggcggaactggaagatatcggctggaaggtgcgcctctgtctgatggatacccagcgcgcgctgaacttcctcgtgcgcaaggcgcgcctgccggcgggccagctggagcaggcgcgggagatcctgcgcgatatcgaatctctgctgccgcacaacgaatcgctgttccagaaggtgaacttcctgatgcaggcggcgatgggttttatcaatatcgagcagaaccgcattatcaagatcttctcggtggtctcggtggtattcctgccgccaactctggtggcctccagttacgggatgaactttgaatttatgccggaactacactggagctttggttatccgggagccatcgtgtttatgatgctggccggcctggcgccatatctctacttcaagcgtaaaaactggctgtaaaaaaagggagcgtcggctcccttctttactggctgatgcaggcttagcctctgcgcaaccggcgctgggtatacagcgcatcgacgataaacaccgccagcgcgacccagataaagccaaaggtcaccattttatccttgcccggcacttcgccgtagaacgtcaccgccagcaggaacatcagcgttgggccgatgtactggaaaaagcccagcgtggagagccgcagacgcgttgccgccccggtaaagcacagcaaagggatggtggtcaccacgcccgcggccatcagcagcagattgagcgaccaggggttctcgcccatatggctggtcgggctgtcggtgatgccgaacaaccagattgccgccaccggcagcagccacagcgtttccaccagcatgccggtttgcgcatcgacagcaattttctttcgcaccaggccgtaaaaggcaaaactgaaagccagcccaagaccgattatcggcagcgaaccaaaggtccacagctggaccagcacgccgcaaaaggcgaggatcaccgccagccactgcagacgacggaagcgttcgccgaggaaaatcatccccaacaaaatattcaccagcgggttgataaagtagccgaggctggcttccagcatatggtggttattcaccgcccagatgaacaacagccagttaccgccgaccagcactgccgagagcgccagcaggaagatcttgcgcggcgttttcagcagctttttcacctgtggccactggcggctgacgctgatgagcgccaccatgaagaagaaagaccagatcacgcgatgggtcagaatttcatcggcgggaacatagtagataagtttgaagtacgctggcgcgataccccagataaagtaggcggcgagggccagaatgatccccaaccgcgtctgtttcgcatccatcggtaaaatccattgccaaagagagtgatgttactcgattttggccaatcaacccaccatataggtggccgttgcgctggcaatatagacctgagcttcgttatgcagttccacgcgggcaactgccactttattgccggcgcgcagcagggtgctggtggcggtaaaacgttcgccgcggcccggacgcaggtagtccacgcgcaggtcgatggttcccatacgggaaagccgctggcgcaactcttcttcgttgatggtgtcatggcgggtaagggtactgccgacgcaaaccaggccagcggcaacgtccagcgcggaggcgatcaccccgccatgcagaatgctttgcgcccagttgccgaccatcatcggctgattattaaagctaagctgggcaaacgctttttcgtagcgttccagttcgagaccgagggcgcggttaaacggcatgtgatagacgaaaatctcccctaccagtttcagggctgcttcggcagtaagttcagacataacaccggttccattcgttaataaaatgttgattttatgcttctaaaatattgatttccactttcggagcggattagggggcaggtgattaataaacaggtagaatggcttcaggttaaacaaaaataaaaactatttttcaggagaccagcatgcgtatctctttggcctgcctggtggcgctgtgcgcgctaccggccggtgttatggcgcaggacgcgtcggtacacgacaaaccggcagtgcgcggcagcattatcgccaacctgctccaggaccatgataatcctttcctgctctacccttatgagagcaactatctgctctatacgtggaccagcgacctcaataaagaggcgatccgcagctatgactgggccgaaaatgcccgtaaagatgaagtgaagtttcagctaagcctggcgttcccgctgtggcgcggtatcctgggcgataattcgctgctgggcgcgtcctatacccagaaatcctggtggcagctctctaacagcaaagagtcggcgccgtttcgcgaaaccaattatgaaccccagctgtttttgggctttgcgaccgactaccagtttgccggctggacgctgcgcgatatcgagatggggtataaccacgactcgaatgggcgttccgaccccacctcgcgcagctggaatcggctttatgcccgcctgatggcgcaaaacggtaactggctggtggaagtgaagccctggtatgtggtgggcaacaccgatgataacccggatatcaccaaatatatgggctattaccggctgaaggtgggctaccagctgggagaggcgatcctcagcgcgcaggggcaatacaactggaacaccggctacggcggggcggaacttggcgtgagctatcccattaccaaacatgttcgcgcctatacgcagatctacagcggctatggcgagtcgcttatcgactataactttaaccaaacgcgcgtcggcgtcgggctaatgctcaacgatctgttttaatcgttgcactctggctcgcaggcgctgaaaatagcgcctgttttcttttcaggcaaatggggtcaatgtggcacaggcggaagtattaaatcaggaatcgctggctaagcaggttttacaagagaccttcggctaccagcagttccgtcctggccaggaaacgattatcgagacggcgctcgaaggccgggactgcctggtggtcatgccgaccggtggcggcaagtcgctgtgctatcaggtgccggcgctggtcatgggcggtctgacggtcgtggtctcaccgctgatctcgctgatgaaggaccaggtcgatcagctgctggccaacggcgtggcggcggcttgtctgaactcgacgcaaagccgcgagcagcagcaggaggtgatggccggctgccgcagcgggcaggttcgtctgctgtatatcgcgccggaacggctgatgctggataactttcttgagcatctggcgaactggaatctggcgatgctggcggtagacgaagcgcactgtatctcgcagtggggccatgacttccgtccggaatatgccgcgctgggccagctgcgtcagcggatgccgcagatcccgtttatggcgttgaccgccaccgccgatgataccacccgccgcgatattgtccgcctgctggggcttaacgatccgctgattcaggtcagcagcttcgaccggccaaacatccgctatatgctgatggagaaattcaagccgctcgatcagctgatgcgctacgttcaggagcagcgcggcaaatcgggcattatctactgcaacagccgttcgaaagtggaagacaccgccgccaggctgcaaagccgcggtattagcgcggcggcttaccatgccggtctggaaaacgacgtgcgcgccgaggtgcaggagaaattccagcgcgacgatctgcagatcgtggtggcgacggtggccttcgggatgggcattaacaagccgaacgtccgctttgtggtgcattttgatattccgcgcaatattgaatcctactatcaggagaccggccgcgccgggcgtgatggcctgccggcggaagcgatgctgttttacgatccggcggatatggcgtggctgcgccgctgtctggaagaaaaacccgccgggccgctacaggatatcgaacggcataagctgaatgcgatgggggcgtttgccgaagcgcagacctgtcgccgtctggtgctgctgaactattttggcgaagggcgtcaggagccgtgcggcaactgcgatatctgtcttgacccgccaaagcagtacgatggcttaatggacgcccgcaaggcgctttcaacgatttaccgggtcaatcaacgcttcggaatgggttacgtggtggaggtcctacgcggggccaacaaccagcgcatccgagagatgggccacgataagctgccggtttacggtatcggccgggagcaaagtcacgagcactgggtgagcgtgatccgccagctgatccaccttgggctggtgacgcagaatatcgcccagcactccgcgctgcagctgaccgaagccgcgcgaccggtgctgcgtggcgaagtgccgctgcagctcgccgtgccgcgtatcgtggcgctgaagccaaaggcgatgcagaaatcctttggcggcaattacgaccgtaaactgttcgccaagctgcgcaaattacgtaaagcgatcgccgacgaagagaacatcccgccatatgtggtctttaacgacgcgacgcttatcgagatggccgaacaatcgccgctgaccgccggcgaaatgctcagcgtcaacggcgtggggactcgcaagctcgagcgtttcgggaagccctttatggcgctgatccgggcgcatgttgatggcgacgatgagtagtcagctggctgaaaaagtgccagaatagtttctctcttcattattttcctgcgggttaactatgctgatgcttttcctcaccgtggcgctggtgcatatcattgcgctgatgagcccggggccggactttttctttgtctcacaaacggccatcagccgctcgcgcagagaggcgatgatgggtgtgctggggatcacctgcggcgtcatggtctgggcgggagtggcgctgctcggcctgaacctgatcctcgcccggatggcgtggctgcataacattataatggtcggcgggggcctgtatctatgctggatgggctaccagatgctgcgtggcgcgctgaaaaaagagacggtggcctcggcggagccgcaggtggagctggcccgcagcggacgcagcttcgtgaagggattgctgaccaatctggcgaatccgaaagcgattatctacttcggctcagtgttttcgctgttcgtgggtgacagcgtcggcgccggcgcgcgctggggcattttcctgctgattatcgttgagacgctggcctggtttatggtggttgccagcctgttcgccctgcccgggatgcgccgcggctatcagcggatggcgaagtggatcgacggtatcgccggtacgctgtttgcgggcttcggcatccacctgattatctcgcgttaaccggcatgctgtttcctacccggttgtttccgggtgggaaagtatcagtggcgaagccgctgcagctcgtcttcagacagaccggtcatttccataatcgcctggtcatcaataccgcgattgcgcatcgcttcggcaacctgcaccagagcctggtgtttaccttcttttatgccctgctgtacgcctttctccataccttctgcaagccatgtttccgccagcgtcatcagtaatcctccatgctgcggcacgcgctgtgccagcccgtacaagagtgtccgagtatcttcggcatcccctgcctgagccatatagtttaccaatacggtgatttgttgtccgctcatctgctccagcagtaagaggtgggtcaacttatccagcaattgcgccatatcgcgctggcggatgtgcttttgcaccagcgtcagggctgccatgctgcggtgctgcatgatgtcgtcgtcggggatcaccgtgatatcgaccagcggaaacgccccgctatagagctggctggcggtctcaggatcggcaaaattatccagccagcgcatcgaccagggataggggctgcgtcgtccctgatagaagagaatagggataaccagaggcagcgttttatggccgctctccaggtgccgctgcatggcggcgatggcatagcgcattaagcgaaaggccatcagcttatcgggtgcgctctggtgctcgatcagaacatggacatagcccgcaccgcgggtggtttccagcgaatgtaggatatcgctgtagtaaggcctgagatcgtcttcgagaaagctgccggattccagacgcagggtgtccagtttgcagatctgtgttaacgacggaggcaggtggagctcgataaaatcgcgcgccgtctctacccgtgagagaaaagttttaaataccgcatcatgaggggtcgccgtttccgccattgccgttcatccatgaatcacgtatctggcggcatcctggcacggcgggttcagcgccgacagcgggcaaaaaaattaattacccactttgcgcgccggctcgcgcagagagaaagcgtcgttcacctcgcgaacctctctttgcgagcgagattccatgattcaggcatggcgggcggaggcgagcagcgccccgaccagcataaacagtgaaccaaagactttgttcaacgccttcatctgctttggccctttgatccatgcggaaatgcgctgcgccagggtcgcatagccaatcatcacaatgatatcgacgacgatggtggtgacgcccagaacgatatattgcatcacctgcggctggtgcggcaggataaactgcggaaacagggcggccagaaaaacaatgcttttgggattggtgagatttacgaacaccgcgcgctgaaacagtttgccgcgcgtctgcgccttcgccagcgtattcaggtcgatcgcccctgccgcccgccattgctggatacccagccagatcaggtaggcggcgccggcccatttcagcacctcaaaggccagcaccgagcgggagaagagagtgccgagaccaacgccaaccagcacgatatgaatggccagcccagtctgcaaaccggcaatcgacgccgccgcgccgcggtatccgtggttaatggaagtggtcatggtattaatcgctccggaacccggcgacaggctgagaataattgatgtcagcaggtaggcgaaccaccactcaatggtcatgagaaactccctgattgtctgtttttatgccacaatacgctattgtgtcagtattgtgtgatacacggtaaaaaaacgattttcagcggttaacaggggtgtaaacccgatgtttgggcagaaaaaggactgggaaacacgagaaaacgcgtttgcggcctttagcatggggccgctgacggatttctggcgacagcgcgaagaagctgaatttaaaggcgtcgacgatgtaccggtacgctttgtccgcttttgcgcgcaacataacgatcgtctggtgttgatttgccccgggcgcattgaaagctacgtgaagtatgctgaagtggcctacgatctctttcactgcggctttgacgtgatgatcattgaccatcgcgggcagggacgctcgggccgcctgctctcagatacccaccgcggacacgtggttaacttcagcgactatgttgatgacctggccgcgctctggcagcagcaggtggttcctggacactggcgaaaacggtttatccttgctcattctatgggcggagcgattgccacgctttttctgcaacgttaccgggcgcattgcgatgcaatagcgctctgcgcgccgatgttcgggattatcattcggctgccggactggatggtgcgccatattctcgactgggctgagggccatcagcgcattcgcgaagagtatgccatcggcaccgggcgctggcgggcgctgccttttgccgttaacgtgctgacgcacagtcggcaacgctatcgtcgcaacctgcgcttctatgccgatgagccgcggctgcaggtcggcggtccgacctggcactgggtgcgtgagggcatgctggccggcgacgaagtgctggcgaatgtggaaaaagataccgccccgacgctgcttttacaggcggaagaggagcgggtggtcgataatctgatgcacgaccgctattgcgaattacgggccgctgccggccatccctgtgagggcggtaagccgctcgtcattgaaggggcatatcatgagatcctttttgaaaaggacgctatgcgctcagtcgcgctcaatgccatcgtcgagtttttcaatcgacatacttaatccgacgataacgctcgtcgccctgcttagaggttaacttttttatgtaccaggttgttgcgtctgatttagacggcacgctgctttcccccgatcatttcctgaccccgtatgccaaagagacgctgaagctgctgaccgcccgtgggatcaatttcgtcttcgccaccggccgtcactacatcgacgtcgggcaaatccgcgataatctcggcatccggtcgtacatgatcacctctaacggcgcccgcgttcacgatagcgatggtcagcaaatctttgcccataacctcgatcgcgatattgccgccgacctgtttgagatcgtgcgtaacgacccgaaaatcgtcactaacgtttatcgggaagacgagtggtatatgaaccgccatcgtccggaagagatgcgcttcttcaaggaggcggtgtttaactacaagctgtatgagccgggcgaactggatccgcaggggatcagcaaagtattctttacctgcgaggatcatgagcatctgctgccgctggagcaggcgatgaacgcccgctggggcgatcgggtgaacgtcagcttctccaccttaacctgcctggaagtcatggcgggtggggtatcgaaggggcatgcgctggaggcggtggcgaagatgctcggctacactctttccgattgcatcgccttcggcgacggtatgaatgacgctgagatgctgtcgatggctggcaaaggctgcatcatggccaacgcccaccagcggctgaaggatctgcatccggaactggaagtgatcggcagtaacgccgacgatgctgtcccgcgctacctgcgtaagctatacctcgactgaaaaagattgacgactggcgaataagtgtccagtcgtcaacctgactcttcgctacaatgcctgttctttatccaacgagacgaccattgtggcgctgttaattatcaccactatcctgtgggccttttcttttagcctgattggcgaatacctggccggtagcgtcgacagctatttttcggtgctgatgcgcgtgggcctggcggcgctggtgttcctgcctttcctgcgcacgcgcggccagtcgccgcgcacgatcgtgctctatatgctggtgggcgcgatgcagctaggcatcatgtacctgctggctttccgcgcctatctctatctgacggtctcggaatttctgctgtttaccgtgtttactcccctgtatatcacgctgatctacgacctgctcagcggacgtaagctgcgctggggctatctgctgagtgccgcgctggcggtgctgggggcggcgattatccgctatgacaaagtcagcgatcatttctggaccgggctgttactggtacagctgtcaaacctctgcttcgccatcggtatggtggggtataagcgtctgatggaggtgcgtccgatgccgcagcacaatgcctttgcctggttctatgtcggggcctttatcgtggcggtggcggcgtggtttatgctcggcaacgcccagaagctgccgaccaccacgctgcagtggagcgtgctggtgtggctcggcgtggtggcttccgggctgggttactttatgtggaactatggcgccacccaggtggatgccggcacgctggggatcatgaataacgtccatgtccccgccgggctgctggttaaccttgccatctggcaggagcagccgcactggccgagctttattagcggagcgttggtgatcctggcctcgctgtgggtccatcgccgctgggtcgctccgcactccggacaaacggcagatgatcgcaggcgtggttccgcgcagagcgaataaacgcttcggtgaccggttgacgctgttcgccatcgcgaacggccgcgtacaaccggctccataatccctcacccagggttttggtgaccaccaggccctggcgttcaaagctttccaccacccagtgcggcagcgcggcgatgcccatccgggcagccaccatctggatcaacaacagcgtgttatcgacgcttttcagctgcgggctgatgccggccggctgcaggaagtggcgccagatatcgaggcgcccgcgctgcacgggataaatcaacagcgtttccgcggccagatcctccggggtaaccagcgtcttcatagctaacggatgctcgggcgccagcaccagacgcacctcaaaatcaaacatcggcgagtagtgcaggccgctgcgcggcagaatatcggaggtcatcaccagatccagttcaccctgctgcagcgcaggctgtgggtcgaaggtgacgccggaatggaagtcgacctccacatgtggccagcgggcgcggaaattctccagcgccggcgtcagccactgaatacagctgtgacattcgatagccagcctcagccgggtctgctgtggttcgttacagtcctgcagggcgcgagcgatctgcggcagcacctggttggccagctgtaagaggatttccccctgaggagtaaaacgcagcggctggctcttacgcacaaagagacgaaagccaaggcgctgttccagatcgctgaactggtgagacaaggcggactgggtctggtgcagggccgctgccgcacccgccagtgaaccgctgttccgcaacgcttgcagcgttttcagatgtttaatttcgatcatgaaagtccttcacttcgccatgagcaatttgcgcttgaggaatatacagtaactgtcaattatggatgtgtaaacatctggacgtctaaaactcgtcatatttcgacttgcagatgcgttggctgccttgcataccccagtcacttccttcagtaagctcctggggatgcgcatcgttgccgccttcctgcaagccgaactattgagattttttcttcagattcaatggaataagagaggaacaaaaatgacaattattaaccacaccctcggttttcctcgcgttggcctgcgccgcgagctgaaaaaagcgcaagagagctactgggcgggcaacgccactcgcgaggaactgctggcggtaggccgtgagctgcgcgcccgtcactgggagcagcagaaacaggcgggcgttgatctgctgccggtgggggatttcgcctggtacgaccatgttctgactaccagcctgctgcttggcaacgtgccggctcgtcatcagaacaaagacggatccatcgacatcgataccctgttccgcattggccgcggccgcgcgccgactggcgaaccggccgccgctgcggaaatgaccaaatggttcaacaccaactatcactatatggtgccggagttcgtgaagggccagcagttcaaactgagctggacccaactgctggatgaagtagacgaagcgctggcgctgggccacaagatcaagcccgtgctgctggggccggtaacctatctgtggctgggtaaagtgaaaggtgaaccgtttgaccgcctgaccctgctgaataccatcctgccggtttaccagcaggtgctggccgaactggcgaagcgcggtatcgattgggtgcagattgatgaaccggcgctggtgctggagctgccgccagcgtggctggaggcctttcaaccggcttatgacgccctgcagggccaggtgaagctgctgctgactacctattttgaaggcgttagcgacaatctcgcgaccattgctgcgctaccggtccaggggctgcacgtcgatctggtgcacggcaaagatgatgttgccgaactgcacaaccgcctgccggccgactggctgctgtccgcgggcttgatcaatgggcgtaacgtctggcgcgccgatctcaccgaaaagtatgcgcaaattaaagacctcgtcggtaagcgcgagctatgggtcgcgtcatcctgctctctgctgcatagcccgatcgatctgagcgtggagacgcgccttgatgcggaagtgaagagctggtttgccttcgcgctgcagaaatgcggtgagctggcgctgctgcgcgatgcgctgaacagcggcgatacagcggcgattaccgagtggagcgcgccaatccaggcccgtcgccattcgacccgcgtgcacaacgcggaggtggaaaaacggctggcggcgatcactgctcaggacagccagcgcgccagcccctatgaggttcgcgcgcaggcacagcgccagcgctttaacctgccgaaatggccgaccaccaccatcgggtcattcccgcaaacgaccgagatccgcggcctgcgcctggacttcaaaaagggtaaccttgacgccagtcattatcggacggggattgcggaacatattaagcaggcgatcgtcgagcaggagcggttaggtttagacgtactggtgcacggggaggccgagcggaacgacatggtggaatacttcggcgaacatctggacggttttatcttcacgcaaaacggctgggtgcagagctatggttcccgctgcgtgaagccgccggtggtgatcggcgacgtcagccgtccgcaggcgatcaccgtcgactgggcgaagtacgcgcagtccctgaccgccaagccggtgaaagggatgctcactggaccggtgaccattctgtgctggtccttcccgcgggaggatgtcagccgtgaaaccatcgcgaaacagattgcgctggccctgcgtgatgaagtggcggatctggaggcggcggggatcggcatcatccagattgatgagccggcgctgcgcgaagggttaccgctgaagcgcagcgactgggatgcctatctgcagtggggtgtggaagccttccgccttaatgctgcggtcgccaaagacgacacgcagatccatacccacatgtgctattgcgagttcaatgacatcatggactccattgccgcgctggacgctgacgtgatcaccattgaaacctcgcggtccgatatggagctgctggagtcgttcgaagcgttcgagtaccccaatgagatcgggccgggagtatatgatattcactcgccaaacgtgccgagcgtggagtggatcgaagcgctgctgaagaaagccgcgcagcgtatcccggtggagcgactgtgggttaacccggactgcggcctgaaaactcgcggctggccggaaacccgcgccgcgctggcgaatatggtgcaagcggcgcgaaatctgcgccagtccgcctaatcgttacgcgaaaaatcaaaaaggaggcatttgcctccttttttcatgcttagggcgattacccttttttaccgccatactgagcaaaccaggcgagcatccgttgccagccgtctttggctgactcttcatgatagctggcgcgatagtcggcgttaaaggcatgatcggcttcgggatagaccacgatttccgccgtggcgttggctgcccgcagcgcctgacgcatagtctcgacggtgtcctgcggaatgctggcgtctttagcgccgtacagaccaagcaccggggcgttgagatcgacggcgatatctaccgggtgcttcggcgaattcagtgatttttctcccaccagcttaccgtaccaggccactgccgctttaagctgcgggttatgcgcggcatacagccaggtaatgcgtccgccccagcagaagccggtgatcagcagacgatgggcatcgccgccgtggcgcgccgcccagctggcgacgtggtcgagatccgccagcacctgcgcgtccggcaccttgctgaccagctctttgaacagggtcgggatatcgtggtactcattcggatcgccctgacggaagtacaattcaggcgcgatagccagatagccttcctgtgccaggcggcgacaaagatcgcgaatatgttcatgcacgccgaaaatttcctgtaccacgataacgatcggcagtggaccgtcggcatttttcgggcgggcgtggtaggccggcatgttttcaccctgagagggaatcgacgtctctccggcgataatatgctcttccggcgtatgaacggcggttgcggcgtgtggtgaagctgcaggtgcgaatccaggttgcttggtggtggtcatggtattctccgtacccttatttattagcgcatcagtaactatagaccctttacctttagttcgggcggtaataaagcacagtgcctgaaagcggctatcttttgttctgtgatgatgaatataacttgttaatgtgatgtgtatcactatttactgaaaaacaactgcaatcattattggtcttggtgactatcatcacaaaatgttgccaggggcttctgtacagtaccgttttgcttctgctgataattcgacccacagaggagttttttatgtccaagtctgatgtttttcatctcggcctcaccaagaacgatttacaaggggctacgctggctatcgtccctggcgatccggagcgtgtggaaaagatcgccgcgctgatggataagccggttaaactggcatctcaccgcgaatttacctcctggcgcgcggagctggacggcaaaccagtgatcgtctgctctactggcatcggcggcccgtcgacttccatcgccgtggaagagctggcgcagctgggggtgcgaaccttcctgcgtatcggcaccaccggcgcgattcaaccgcacattaacgttggcgatgtgctggtgactaccgcctccgttcgtctggacggcgccagcctgcacttcgcgccgatggagttcccggccgtcgcagacttcgcctgtaccaccgcgctggtggaagcggcgaaatcaatcggcgcgaccacccatatcggcgtaaccgcttcctcggataccttctacccgggccaggagcgttacgacaccttctccggccgcgtggtgagccgcttcaagggctcaatggaagagtggcaggcaatgggcgtgatgaactatgaaatggaatccgccacgctgctgaccatgtgcgccagccagggcctgcgcgccgggatggtggctggggttatcgtgaaccgtacccagcaagagatccctaacgccgaaaccatgaagcaaaccgaaagccacgcggtgaaaatcgtcgtggaagcggcgcgtcgtctgctgtaactcaacactttccctgtcaggccggatcctccggcctttcttttttgcgtcgcctctcgcaggaaattccttttaaactggacgtttgtacagcacaattctattttgtgtcatcaggttatcgcagggggcgtcgtggatctctccattattatcagcgcggttatcgcactggcagccgggttaatggtcggctggctggcgaccaaagcgcgcgccgatcaaattcgggccgatctcatcgaggaacggcgagagttggatattgagctgagcgccgcccgccagcaactggcgcaggaggcccactggcgtgaggagtgtgagctgctgaacaacgagctgcgcagcctgcgggatatcaatacctcgctcgaggccgatctccgtgaggtcaccacccggctcgaatccacccagctgcatgcggaagataagatccgccagatgatgaacagcgagcagcgccttagcgagcagtttgaaaacctcgccaaccgtattttcgaacacagcaaccggcgggtcgatgagcaaaaccgccagagcctgcatggcctgctgacgccgctacgcgaacagctggacgggttccgccgccaggtgcaggagagctttggccaggaggcgcgtgaaagacataccctggcgcatgagatccgcaatctgcagcagttgaacgcgcagatggcacaggaggcgctgaacctgaccaaagcgctgaagggggataacaaaactcagggcaactggggggaagtggtcttaacccgcgtgctggaggcctccggcctgcgcgaaggctatgagtaccagactcaggtcagtattgagaccgacaaccgctcgcggatgcagccggacgttatcgtgcgcctgccgcagggtaaggacgtggtgatcgacgccaaaatgaccctggtcgcctatgagcgctatttcaacgccgaagacgactacacccgcgaagtcgcgctgcaggaacaccttgcctcggtgcgaaaccatattcgcctgctgggacgcaaggattatcaacagctgcctggcctgcgctcgctcgactatgtgctgatgtttattcccgttgagccggcgttcctgctggccatcgatcgccagcctgagctcatcagcgaggcgctgcaaaataatattatgctggttagcccgacgacgctgctggtagccctgcgcactatcgccaatctgtggcgctatgagcaccagagtcgtaacgcgcagaagattgccgagcgggcggggcgcctttacgacaaaatgcgcctgtttgtggatgatatgtccgccatcggccagagcctggataaggcgcaagagagctatcgccaggcgatgaaaaagctcgcttccgggcgtggtaatctgctggcccaggcggaggcctttcgcggcctgggcgtggaggtcaagcgcgggattaatcctgatttagtcgaacaagctacggctcaggacgagcaatatcgtctcgaagatgaggataacctgccggaaaatgacgcattttcagccgactctgccgagacggtgcgtagccgggaggcggctccgccacgctgaaacgtatgggaaatgcgctgagtctgatacactcagtgaacattttcttgaaaagcaagcaggcatagagatggttgaggattcacaagaaacgacgcactttggctttcagacggtcgctaaagagcagaaagcagatatggtggcgcatgtattccattctgtcgccgcaaaatatgatgtgatgaacgacctgatgtcgtttgggatccatcgtttgtggaagcgtttcaccatcgactgcagcggcgtacgtcgcgggcagaccgtgctggatctggctggtggtaccggtgatttgacggccaagttctcccgcctggtaggggaaaccggccgcgtcatgcttgctgatatcaatgattctatgctcaaaatgggccgcgaaaagctgcgcaatatcggcatcgtaggcaacgttgagtatgttcaggccaacgcggaagccctgccttttgctgataatacctttgactgcatcaccatctctttcggtctgcgtaacgtgaccgacaaagagaaagcgctgcgttcgatgtaccgcgtgctgaagccgggcggacgtctgctggtgctggagttttctaaacccattatcgaaccgctgagcaaagcctacgacgcttactccttccatatcctgccgaaggtgggcgagctggtggcaaaggatggcgacagctatcgctacctggcggaatctattcgtatgcatccggaccaggaaaccctgaaagggatgatgcaggatgcgggcttcgaaaacgtggattactacaacctgacggcgggtatcgttgctttgcatcgcggttacaagttctgacaggagggacgctatgcctttcacacccctggttaccgctggcattgaaacggcgctgaatactttcctctggcgcgacaaagcgcttaaacccgctcgtcagcgcctgctgggcaaggtattgcgggtccagctgcaggatttcgccacgcccgtggtgctggtattcagcgaacgccaggttgacgtcctgagcgcctgggacggagaggccgattgcaccgtgattacccggctcagcgtgctgccaaaactacgcaatcgtcagcagctcacggcgcttattcgcagcggtgatctggaagtgcagggcgatctgcaggtggtgcagaatatggtctccctgtgcgacctggcagagtttgatcccgctgaactgctggcgccctataccggcgatattgtggccgaaggcgtcggtaaagtcctgcgcggcggcgctcagtttctgctgaagggggcagagcgccagcagcgctatgtcgcggaagcgatcactgaagagtggcgcctggcgccggggccgctggagctggcctggtttgctgaagagacaacggctattgagcgcgcgctggccgcactggaaaaacggctggaaacgctggagggcaaatgacgccaggagaattacggcgcctgtatttcatcatccacacctttttgagctacgggctcgatgagctcatccccaaaatgcggatcacgctgccgctgcgtatctggcggcggatgctgttctggatgccaaaccgccatcaggatcagcctcttggcgcccgccttcggctggcgctccaggagctggggccggtgtggataaaattcggccagatgctttccacccgccgggatctctttccgccgcatattgccgatcagctggcgctgttgcaggaccgcgtggcgccctttgaagggaagctcgcgcagcagcagatagagaaagcgatgggggggctgccggtcgagacctggtttgatgatttctccgttgagccgttagcctcggcgtccatcgcccaggtgcataccgcgcgtctgaaagagaatggcaaagaggtggtgatcaaggttatccgcccggatattttgccgatcattaaagcggacatgaagctcatctaccgcctggcgcgctgggtaccgcgtctgctgcctgacggtcgtcgtctgcgcccgcaggaggtagttcgtgaatatgaaaaaacgctgctggatgagctgaacctgctgcgggaatccgccaacgctattcagctgcggcgtaatttcgaagacagcccgatgctgtacgtgccggaggtgtaccccgactactgcagcgaaagcatgatggtaatggagcgcatttacggtatcccggtgtccgatgtggaggcgctggaggcccagggcaccaatatgcagctgctggcggagcggggcgtgcaggtcttcttcacccaggtgttccgcgacagcttcttccatgccgatatgcatcctggcaacatattcgtcagctacgagcatccggaagatccgcagtatatcggcatcgactgcggtattgtcggctcactgaacaaagaagataagcgctatctggcggaaaactttatcgcctttttcaaccgcgattatcgtaaagttgccgagctgcacgtcgattccggttgggttccgcccgataccaacgttgaagagtttgagttcgcgatccgcacggtctgcgagccgatctttgagaagccgctggcggagatctccttcggccacgtgctgcttaatctgttcaataccgcgcggcgtttcaatatggaagtccagccgcagctcgttttactacagaagacattactttacgtagaaggggtaggccggcagctctatcctcagttagacttgtggaaaacggcgaagcctttcctcgagtcgtggatcaaagatcaggtcggcattccggcgctggtgcgcgcgtttaaagacaaagcgccgttctggatcgaaagaatgccggaaatacctgagctggtgtatcagagcctgcagcagagcaaacagctgcagaccagcgtcgatactattgtgcgggatatgcgtgtgcgtcatgtgcgccagggccaatcccgttacctgtttggtataggcgcggttttattgctcagtggtacgctgctctttatccatcgccctgagtggggaatgatgcccggttggctgatggccggcggtgtggtgacctggcttattggctggcggaaaacccactgatcggttcgcctcttcatgacgcaggcttatttgcgcaaaatcatgtcggcggcctgacgaagaggcggctcgcaggatggcgtgtataatgcgtccacacaattcatcatctgtcataggggaacgtgtatgggtggtatcagtatttggcagttattaattgttgtcgtcatcgtagttctgctttttgggacgaagaagctgagctcgctggggtctgacttaggggcatctatcaaaggctttaaaaaagccatgagtgatgatgataaacccgaaaagtcggcgccagacgcagatttcacggcgaaaaccatcgccgataaacaggatgatgcaaaaaaagacgagacaaaacgccacgacaaagagcaggtgtaactcgtgttcgatattggttttagtgaactactgctggtgtttgtgattggcctcattgttctggggccacagcggcttcccgtagcggttaaaacggtagttggctggatccgtacgttacgctcgctggcgaccacggtacaaaatgagctggcccaggagctaaaactgcaggagttccaggagagcctgaagaaggtggaaaaggctagcctgaataacctgacgccggagctgaaagcctcgatggatgaactgcgcgaggccgcggagtcgatgaagcgctcctatagcgcccacgatcccgaaaaagccagcgacgaagccaataccatccttaatccggtggtcaaaggcagcgaagcgcagcgccaggacgtcacgccggcgacggcagaacatcaggccagcgctccggctcatgcgccagatcccgttgccgccgagcaatctgcttcaccggctgaccttcaggcagagaaaacgtccgctacggcggtagttccccattcttcccccgcatcgagtgataaaccgtaaacatgggcgtagacgatacacaaccgctaatttcgcatctgattgagctgcgcaagcgtctgctcaacagcatcattgctattctggtgatcttcctggcgctggtctatttcgccaatgatatctaccagctggtctcggccccgcttatcagtaagatgccagtgggcgcgacgatgatcgccaccgatgtcgcttcacctttctttacgccgataaagttgaccttcatggtgtcggtgatcctgtcggtgccgattattctttaccaggtatgggccttcgtcgcgccggcgttgtataagcacgaacgccggctggtggtgcctttactggtatccagtaccctgctgttctatatcggcatggctttcgcctattttgtcgtgtttccgctggcgttcggcttcctgacccatgcggcgccggaaggggtgctggtctcgaccgatattcgcagctatctcgacttcgtgatggcgctgtttatggcattcggggtctcctttgaggtgccggtcgccattgtgttgctctgctggatgggcgttaccacgccggaagacttgcgtaaaaaaaggccgtatgtgctggtgggtgccttcgtggtgggcatgctgctgacgccgccggacgtattctcgcagacactgctggccattccgatgtactgtctgtttgaagtcggggtgttctttgcccgcttctacaccgggaagcgcctgacgcgcgatgacgacgccgcggccgaagctgaagccgcagagcacagagaagagtaataccgccaaccgcccgtcagggcggttggcatatgggagcgatcatgtttgatatcggcgttaatctgaccagttcgcagttttcccgcgatcatgatgaggtagtggcgcgcgccctggcggcgggggttaacggcatgctgctgaccggcacaaatttggcggagagccagcaggcgcagaaactggcgagccgctattccggctgctggtccacggcgggggttcatccccatgacggtagcagctggacgccagcggtcgccgaggcgatttacaccctcgccggcgagccgcaggtggtggcgataggcgagtgcggtctggattttaaccggaatttttccacgccgcacgagcaggaggtagcgttcagcgcccagctggcgctggccgctgagctgtcgatgccggtgtttttgcactgccgcgacgcccacgatcggtttctgacgctgcttaaaccctggcttgagaagctcccgggcgcggtgctgcactgctttaccggcagccgcagcgaggtgcaggaatgcctggatctgggcctgtttatcggtattaccggttgggtttgcgatgagcggcggggactggagctgcgcgagctgctgccggcgatcccggcggaacgtctgctgctggagaccgatgcgccttatctgctgccgcgcgatctcaagccgaaaccggcctcgcggcgtaacgagcccgcgtatttgccgcatatcctggccagcgtcgcggcctggcgcggcgaggaggcgcaatggctggaggcgcaaacggacgcaaacgtcagggcgctgtttggcgtcgacattaacggcgtttagattttctggaagtcggtatttttaacgctctgcaggacttgcttattcagcaggtttaacagcaacatagagcgcgcttcgccgtcgggctcggtgaagatcgcctccaggccttcaaacgcgccgtcggtgattagcacgctatcgccctcatgcggcgtttccgggtcggtaatcccttccggtttgtagatagaaagctgatggatgaccgccgaggggacgatagcgggtagggcgccaaagcgcacgaagttgttaaccccgcgagtggcgctgatggtggtggtatgaatcacctctggatcgaactcaataaacaggtagttcgggaacaacggttcgctgaccatggtgcgtttaccgcgaatgattttttccagcgcaatcgtcggcatcaggcagttaactgactgacgttccagatgttcctgggctcgttgtagctgcccacgtttgcaatacagtaagtaccaggcttgcataatgactcattccacttctaataacggcaagcataacaaatggctggtgtaatcgcgaaagccattataattgaaatccaaatttcagcgttctttcacgctaatttaacaaaattacagcatcgcgccgtcgaacaccgtataattagccgcctgtagagaggtcaataacacttccatgaaatatcacgatcttcgcgactttctgacactcctggaacaacagggcgaactaaaacgtatcactctgccggtcgatcctcacctggaaatcaccgaaattgccgaccggactctgcgcgccggcggcccggcgttgctgtttgagaatccgaaaggctataccatgccggtgctgtgcaatctgttcggcacgccgcgtcgcgtggcgttggggatggggcaggaggatgtcagttcgctgcgcgaggtgggtaaactgttggcctttctgaaagaacctgagccgccaaaaggcttccgcgacctgtttgataagctgccgcagttcaagcaagtgctgaatatgccgaccaaacgcctgcgcggcgccccctgtcagcaaaaaatcatccagggcgatgatgtcgatctgaataaaatcccgattatgacctgctggccggaagatgccgcgccgctgatcacctgggggttgacggtaacccgcgggccgcacaaagagcggcagaacctgggaatttatcgccagcagctgatcggcaaaaacaaactgattatgcgctggctgtctcatcgcggcggcgcgctggatttccaggagtggtgcgcggcgcgtccgggcgaacgcttcccggtttccgtggcgcttggcgccgatccggcaaccattcttggcgcggtgacgccggtgcccgataccctgtcggaatatgctttcgcaggcctgctgcgcggcaccaagaccgaagtggttaagtgcgtttccaatgaccttgaagtgccggccagcgcggaaattgtgcttgaaggctacattgaggccggtgaaatggcgccggaaggcccgtatggcgatcacaccggttactacaatgaagtggacagcttcccggtatttacggtaacccatattacccagcgtgaagacgcgatttatcattctacctataccggccgaccgcccgatgagccagcggtgctgggcgtggcgctgaatgaagtctttgtgccgatcctgcaaaagcagttcccggaaatcgttgatttctatctgccgccggaagggtgctcctatcgcctggcggtggtgaccatgaaaaaacagtacgcgggacatgccaagcgcgtaatgatgggcgtctggtcgttcctgcgccagtttatgtacaccaagttcgtgattgtctgcgatgacgacgtcaatgcacgcgactggaacgatgtgatttgggcgatcactacccgtatggacccggctcgtgatacggtactggtagagaatacgccaattgattatctggattttgcctcgccggtttccggcctgggttcaaaaatggggctggatgccaccaataaatggcctggcgaaacccagcgtgaatggggtcgcccaatcaaaaaagatcctgccgttacggcgcgtattgacgccatctgggatgaactggccatctttaaacaacagtaagcggggctaacgccgctgttttgctctattgacccgacagaggggacgcatgacaaccttaagctgtaaagtgacctcggtggaggcgattaccgataccgtatatcgtgttcgattagtgccggaagcggcattttccttccgtgccggccagtatctgatggtggtaatggatgagcgcgacaagcgcccgttctccatggcttccacgccggcggaacaggaatttatcgagctgcatatcggcgcctcggagctcaatctgtacgcgatggcggtcatggatcgcattctgaaagagcgtgaaattgaggttgatattccgcatggcgaagcgtggctgcgcgatgacgaagatcgcccgctgattctgatcgccggcggtaccggattctcttatgtgcgttctattctgttaagcgcgctggcgcgtaacccggatcgcgatatcgccatttattggggcggccgcgaggctaagcatctgtacgatctggccgagctggaagcgttaagcatcaagcatccgaatctgcgcatcgagccggtggttgaacagccggaagaagggtggcgtggtcgctccggtacggtactcaccgccgtgctgcaggattacggtacgctggccgagcatgacatctacattgccggtcgttttgagatggccaagatcgctcgcgacctgttctgtaatgagcgcggcgcgcgtgaagatcgcctgtttggcgatgcgtttgcgtttatctgaaaataaaaaacccgcccctgacaggcgggaagaacggcaactaaacctgctctcttcgccatagccgccaggttctggtggcaatggcgttgagataccctttcgcttaaacccgctcaaacacggtagcgatcccttgtcccaggccgatacacatggtggcgagtccgaactgagcgtctttgcgctccatctggttgatcagcgtggtgctaatacgcgccccggaacagcccagcggatgaccgagcgcgatcgccccgccgttgaggttgatcttctcatcgatctgctccattaagcccagatctttaatacacggtaggatctgcgcggcaaatgcttcattcatttcaaaaacgtcgatatcgctggtggataagcccgcttttttcagcgccagctttgaggccggaaccgggccataacccataatggacgggtcgcagccgaccaccgccattgaacggacgcgagcgcgcggcttcagccccagctcgcgagcgcggctttcgctcatcagcagcatcgccgctgcgccatcggaaagggcggaagaggtacccgccgttaccgtaccggtcaccgggtcaaacgccggtttaagcgtggacagcgtctcgacggtggtttccgggcggatcacctcgtcatagttaaaggacttgagtacgccatcggcatcgtggccgccggtggggataatctccgctttgaatgcgccggactgggttgcggcccaggcacgagcgtgagagcgcgcggcgaactgatcctgcatctcgcggctaataccgtgcagacgcgccagcatctccgcagtcagccccatcatccctgccgcctttgccacgttgcggctgaggcccggatggaaatcgacgccatggctcattggcacatggcccatgtgctcgacgccgccaatcaggcagacgccggcatcgccggtcatgatcatacgggccgcatcgtgcagcgcctgcatggaagaaccgcacagacggttgaccgtatttgctggtaccgaatgcgggatctccgccagcagcgccgcgtttcgggcgatgttaaaaccctgctcgagggtttgctgcacgcaaccccagtagatatcgtctatcgcgcttgcctcaagcgacggattgcgcgacagcaggctacgcatcaggtgcgcggagaggtcttccgcgcgcacgtggcgaaatgcgccgcccttcgaacggcccatcggggtgcgaattgcatcgacaatgacaacctgttccattgtgactccttaagccgttttcagagcgccaaccggacgggctggctctacctggggataatacgcttcgttatggcgcgctttgtcacgcagaccggctggcacttcatacagcgggccaaggtgctggtattgctgcgccatatcgagatacttcgcgctgccgatggtgtccagccagcggaatgcgccgccgtggaatggagggaagcccaggccgtataccagcgccatatccgcttccgccgggctggcgataatgccttcttccaggcagcggacgacttcgttaaccatggggatcatcatgcgggcgataatctcttcatcgctgaaatcgcgcttcggctggctgacgtcggccagcaggctgtcgacggcagcatcttcttctttcttcggcttacctttgctgtcgtctttatagcgccagaagccgaggccgttcttctggccgaaacggttggcgtcaaacagggcgtcgatggcgtcgcgataatctttctgcatccgctgcgggaagcccgccgccatgaccgcctgagcatggtgcgcggtatcgatgccgaccacgtccagcagataagccgggcccatcggccagccaaactgtttctccatcactttgtcgactttgcggaagtccgccccgtcgcgcagcagctggctgaagccggcgaagtaggggaacagtacccggttgacgaagaagccgggacaatcattcaccacaatcggcgttttgcccattttgctggcccaggccaccactttggcaatggtattatccgaggttttttcgccgcggatcacttcaaccagcggcatgcgatgcaccgggttaaagaagtgcataccgcagaagttttccgggcgctgcagaacgctggccagctcgctgatggggatcgttgaggtgttggacgccagcacggtatccgggcgcacttttgactcggtttccgctagtacggctttcttcactttcgggttttccaccaccgcttcaacgacgacgtccacgcggtcaaaaccgctgtattccagcgttggctgaatggtgctaatcactccggccagcttcagaccgtcgattttgccgcgttccagctgtttattcagcagtttcgccgcttcggtcatacccagggtcagcgatttgtcgctgatgtctttcatcaccaccggcacgcccttccaggccgactggtaagcgataccgccgcccataatgccagcgcccaggacggcagcatgcttcggcgtctcgacatctttggtcagctttttcgctttcgctttgacgtactggtcgttcaggaagataccaaccagcgcgcgggcctcattggtatgggccagcgggacaaagcttttattttccagcaccagggcttcttcacgaccaagacgcgcggcggcttcaatggttttgaccgcggtgatcggcgccgggtaatgcttcccggcggtttgcgcgaccatgcctttggcaatcgtgaagctcatggcggcttcaattttgctgagcttcagcggctccagcttcggctgacgtttcgctttccagtccaggtcgccattcatggcctgacgtaggatcgccagcgcgccgtcgcgtagtttttccgcagcgaccacgccatccaccaggccgattttcagtgcttgatcggcgccgacgtctttcccggcggcaataatttccagcgcgctatcggcgccgagcaggcgcggcagacgcacggaaccgccgaagccgggcataatgccgagcttggtttccggcagcccaatgcgcagatccggcgtcgccaggcggtaatcggtcgccagcacgcattcgcaaccgccgcccagcgcatagccattgacggcagagattgtggggacggggagatcttccagacgattgaagacgctgttagcaaaatgcagccactggcttaactgctcctcagggaccaggaacagcgagaggaattcggtgatatccgcgccgacgataaatgccgctttttcagagcgcagcagcagacctttgagatcgctttgtttttccagtacgtccagcgcatgaccgaggctggctacggttgcggtatcaagcttgttgaccgaacctggggcatcgaacaccagttcggcgatgccatcttccagccagtcgaggtacagggtgtcgcctttgtagagcatgtcagtctcctgaatccagcaatatgatctggtcataccagatgaaacggagtgtggaatttatgttaaagaattgcaaattagtctttaaataattgctggtcggatcacatccggcggaaatcacccgcacgcaggtcgatgtgctaagatgcggtgtatcacgatcccataaaagcaaaggataaaagatggaatccctggccgcgctctataaaaatcatattgttaccctacaagaacgtacccgcgacgtcctggcccgttttcaaatggatgctctgctgattcactccggcgagctggttaacgtcttccttgatgaccatccgtacccgttcaaggtcaatccgcagttcaaagcctgggtgcctgtgactcaggtgcctaactgctggctgctggtggacggtgtgaataaaccgaagctgtggttctatctgccggtagattactggcataacgttgagccgttgccgacctctttctggaccgaagagatagacgtgatcgcgctaccgaaggccgatggcatcggcagccagctgcctgccgctcgcggtaatattggatatatcggcccggtgcctgagcgcgcgctgggcctgggtatcgccgcggataagatcaacccgaaaggggttatcgactacctgcattactaccgggcttacaaaaccgattacgagctggcctgcatgcgtgaagcgcagaagtcggcggtgaatggtcatcgtgcggcctacgaagctttccagtcggggatgagcgaattcgatatcaaccaggcctatctcaccgccaccggccatcgtgataccgacgtgccttacagcaatattgtcgcgctgaatgagcatgcctccgtcctgcactacaccaaactggaccatcgtgccccggcggagatgcgcagtttcctgctcgacgccggtgcggaatataacggctatgccgcagatctgacgcgcacctgggcggcgcacggcgataacgactttgcccatctgatcaaagacgttaacgatgagcagctggcgctgattagtaccatgaaggccggtaccagttacattgattaccatatccagttccatcagcgtatcgcgaagctgttgcgtaaacaccagttggttaccgacatgagcgaagaggcgatggtggagaatgacctgaccgggccgtttatgccgcacgggattggccatccgctgggtctgcaggtgcatgatgtcgctggctttatgcaggatgacaccggtacgcatctggcggcgccgtcgaaatacccgtatctgcgctgcacccgtattatcgagccgcggatggtgttaactattgaacccggcatctacttcatcgagtcgttactggcgccgtggcgtgaaggcccgttcagcaagcactttaactggcaaaaaattgacgccatgaagccgttcggtgggatccgtatcgaagataacgtggtgattcacgaaaacagtatcgaaaatatgacgcgcgatctgaagctggcctgatggagagctggttaatcccggcagcgccggttaccgtcgttgaggagattaaaaaaagccgttttatcacgctgttggcgcataccgacggcgtggcggcggcaaaagcttttgtcgagtccgtcagagcggatcaccctgatgcccgccaccactgcgtggcgtgggtcgcggggccgcctgatgattcgcaacagctggggttttcagacgatggcgaaccggcgggaacggcgggtaaaccgatgctggcgcagctgatgggaagcggcgtcggcgagataaccgctgtcgtcgtgcgttactacggtggtatcctgctgggcaccggcggtctggttaaggcctatggcggcggggtgcatcaggcgctggcgcagctgacgacgctgcgcaagacgccgttaacggcatatactttgcagtgtgagtatgggcaactggccggcgtcgaagcgctgctcgcccaattctccgggaacgtcgttgaaagcgaatatctggcgtcagttcggctgcgcgtggcgcttccccaggccgaagtggcggctttttcagcaagactggctgattttagtcgtggttcattgcaattactgaagattaacgaataatcccctctgttttttgcctatcaaaggaagcgccagagatgcattttcgcgccataacccgaatcgttggactgctggtcatcttgttttcggggacgatgatcgtcccgggattagtggccctgatatatcgcgatggcgcgggacgggccttcactcaaaccttctttgtcgctctggcgatcggctccatgctgtggtggccgaaccgtaagcaaaaaggcgaactgaaatctcgtgaagggtttctgatcgtggtgctgttctggaccgtgctggggagcgtgggggccttgccctttatcttctccgaacagccgaacctgacggtgacggatgccttcttcgagtcattttccggcctgacgacgaccggggcgaccactctggtggggctggactcgcttccgcacgctatcctcttttatcgccagatgctgcagtggttcggcggcatggggatcattgtgctggcggtagcgattctgcctatcctcggcgtcggggggatgcagctctaccgcgcggaaatgcccggcccgctgaaggataacaagatgcgtccgcgtattgccgagacggcgaagacattgtggctcatctatgtgttactcacgatcgcctgcgcattggcgctctggtttgccggtatgccggcgttcgatgcgatcgggcacagtttcgccaccatcgccatcggcggtttctcgactcacgatgccagcgtcggctatttcaacagcccgatgatcaactccatcattgccatcttcctgctgatctccggctgtaactacggtctgcatttttcgttgttgagcggacgcagcctgaaggtgtactggcgcgaccctgaatttaggatgttcattggcgtccagttgacgctggtcatcgtctgtacgctggtgctatggcttcataacgtgtacggctcggtgttgacgacgctgaaccaggcgtttttccaggtggtgtcgatggcgaccaccgcggggttcaccaccgatagcattgcacgctggccgctgttccttccggtgctgttgctgtgctccgcatttatcggcggctgcgctggctccacgggcggtggattaaaagtgatccgtatcctgttgctgttcaagcagggcaaccgtgagctgaagcggctggtgcacccgaatgcggtgtatagcattaaattaggtaaccgcgcgctgccggaacgtattctggaagcggtatggggattcttctccgcctatgcgctggtctttatcattagtatgctggcgattatcgccaccggggtggatgacttctctgctttcgcctccgtggtggcgacattgaacaacctcgggcctgggctcggcgtcgtcgcggataactttgccaccatgaacccggtcgcgaaatggatcctgattgctaatatgctgtttggtcgtctggaagtgttcaccttactggtgctctttacccccactttctggcgcgaataacaggagtgctcgtgaaaactttaattctcttctccacccgcgacgggcagacccgtgaaatcgcttcgtttctcgcctctgagcttaaagagctgggcatcgatgcggacaccctgaatctgaaccgtaccgatgtcgtcgaatggcatcactacgatcgggtggtcattggcgcgtcgattcgctatgggcactttcatccggcggtggaccgctttgtgaaaaagcatctggcagcattgcaggcgctgccgggggcattcttttcggttaacctggtggcgcgtaaacccgagaagcgcacgccgcagaccaacagctatacgcgtaagtttctgctgaactcgccgtggcagccgcagagctgcgcggtatttgccggcgcgctgcgctacccgcgctacagctggtacgatcggtttatgatccgcctgattatgaaaatgaccgggggtgaaacggatacccgcaaagaagtggtctataccgactggcaacaggtatcccggtttgctcgggaaatcgcacaaatggcgcgcaaatagcgcgtaaaactcgcgttgtgatggaaaatcgagcgaacgaaaagtttttttgcatttccccttgccacctcagaattactccctataatgcgcctccactgacacggaacaacggcaaacaagccgccgggtcagcggggttccggtgagaacctcgcagagaaaagcaaaaataaatgcttgactctgcagcgggaaagcgtaatatgcacaccccgcgccgcagcgaaaacgaagcggcactgctctttaacaatttatcagacaatctgtgtgggcactcaaagtgacatggattcttaacgtcctcggacgaaaaatgaataccaagtctcaagagtgaacacgtaattcattacgaagtttaattctttgagcatcaaacttaaattgaagagtttgatcatggctcagattgaacgctggcggcaggcctaacacatgcaagtcgagcggtagcacagagagcttgctctcgggtgacgagcggcggacgggtgagtaatgtctgggaaactgcctgatggagggggataactactggaaacggtagctaataccgcataatgtcgcaagaccaaagtgggggaccttcgggcctcatgccatcagatgtgcccagatgggattagctagtaggtggggtaacggctcacctaggcgacgatccctagctggtctgagaggatgaccagccacactggaactgagacacggtccagactcctacgggaggcagcagtggggaatattgcacaatgggcgcaagcctgatgcagccatgccgcgtgtgtgaagaaggccttcgggttgtaaagcactttcagcggggaggaaggcggtgaggttaataacctcatcgattgacgttacccgcagaagaagcaccggctaactccgtgccagcagccgcggtaatacggagggtgcaagcgttaatcggaattactgggcgtaaagcgcacgcaggcggtctgtcaagtcggatgtgaaatccccgggctcaacctgggaactgcattcgaaactggcaggctagagtcttgtagaggggggtagaattccaggtgtagcggtgaaatgcgtagagatctggaggaataccggtggcgaaggcggccccctggacaaagactgacgctcaggtgcgaaagcgtggggagcaaacaggattagataccctggtagtccacgccgtaaacgatgtcgatttggaggttgtgcccttgaggcgtggcttccggagctaacgcgttaaatcgaccgcctggggagtacggccgcaaggttaaaactcaaatgaattgacgggggcccgcacaagcggtggagcatgtggtttaattcgatgcaacgcgaagaaccttacctggtcttgacatccacagaacttagcagagatgctttggtgccttcgggaactgtgagacaggtgctgcatggctgtcgtcagctcgtgttgtgaaatgttgggttaagtcccgcaacgagcgcaacccttatcctttgttgccagcggttaggccgggaactcaaaggagactgccagtgataaactggaggaaggtggggatgacgtcaagtcatcatggcccttacgaccagggctacacacgtgctacaatggcatatacaaagagaagcgacctcgcgagagcaagcggacctcataaagtatgtcgtagtccggattggagtctgcaactcgactccatgaagtcggaatcgctagtaatcgtagatcagaatgctacggtgaatacgttcccgggccttgtacacaccgcccgtcacaccatgggagtgggttgcaaaagaagtaggtagcttaaccttcgggagggcgcttaccactttgtgattcatgactggggtgaagtcgtaacaaggtaaccgtaggggaacctgcggttggatcacctccttaccttaaagaacctgcctttgcagtgctcacacagattgtctgatgaaaacagcagtaaaaacctctacaggcttgtagctcaggtggttagagcgcacccctgataagggtgaggtcggtggttcaagtccactcaggcctaccaaatttgcgaagcaaatttgaagaggttgcaaacgatggggctatagctcagctgggagagcgcctgctttgcacgcaggaggtctgcggttcgatcccgcatagctccaccatctttactgcgaacacaagaaaacttcagagtgaacctgaaaaggtgcactgcgaagttttgctctttaaaaatctggatcaagctgaaaattgaaacgacacacagtcaatgtgtgttcgagtatctcaaattttcgcaatcagaagtgaaacatcttcgggttgtgaggttaagcgactaagcgtacacggtggatgccctggcagtcagaggcgatgaaggacgtgctaatctgcgaaaagcgtcggtaaggtgatatgaaccgttataaccggcgatgtccgaatggggaaacccagtgcaattcgttgcactatcgttaactgaatacataggttaacgaggcgaaccgggggaactgaaacatctaagtaccccgaggaaaagaaatcaaccgagattcccccagtagcggcgagcgaacggggagcagcccagagtctgaatcagcttgtgtgttagtggaacggtctggaaagtccgacggtacagggtgatagtcccgtacaccaaaatgcacaggctgtgaactcgaagagtagggcgggacacgtggtatcctgtctgaatatggggggaccatcctccaaggctaaatactcctgactgaccgatagtgaaccagtaccgtgagggaaaggcgaaaagaaccccggcgaggggagtgaaaaagaacctgaaaccgtgtacgtacaagcagtgggagcaccttcgggtgtgactgcgtaccttttgtataatgggtcagcgacttatattctgtagcaaggttaaccgtataggggagccgcagggaaaccgagtcttaactgggcgttaagttgcagggtatagacccgaaacccggtgatctagccatgggcaggttgaaggttgggtaacactaactggaggaccgaaccgactaatgttgaaaaattagcggatgacttgtggctgggggtgaaaggccaatcaaaccgggagatagctggttctccccgaaagctatttaggtagcgcctcgtgaactcatcttcgggggtagagcactgtttcggctagggggtcatcccgacttaccaacccgatgcaaactacgaataccgaagaatgttatcacgggagacacacggcgggtgctaacgtccgtcgtgaagagggaaacaacccagaccgccagctaaggtcccaaagtcatggttaagtgggaaacgatgtgggaaggcacagacagccaggatgttggcttagaagcagccatcatttaaagaaagcgtaatagctcactggtcgagtcggcctgcgcggaagatgtaacggggctaaaccatgcaccgaagctgcggcagcgacactatgtgttgttgggtaggggagcgttctgtaagcctgcgaaggtgtgctgtgaggcatgctggaggtatcagaagtgcgaatgctgacataagtaacgataaagcgggtgaaaagcccgctcgccggaagaccaagggttcctgtccaacgttaatcggggcagggtgagtcgacccctaaggcgaggccgaaaggcgtagtcgatgggaaacaggttaatattcctgtacttggtgttactgcgaaggggggacggagaaggctatgttagccgggcgacggttgtcccggtttaagcatgtaggctggttgtccaggcaaatccggataatcaaggctgaggtgtgatgacgaggcactacggtgctgaagtaacaaatgccctgcttccaggaaaagcctctaagcatcaggtaacatcaaatcgtaccccaaaccgacacaggtggtcaggtagagaataccaaggcgcttgagagaactcgggtgaaggaactaggcaaaatggtgccgtaacttcgggagaaggcacgctggtgtgtaggtgaagcccctgcgggtggagctgagaccagtcgaagataccagctggctgcaactgtttattaaaaacacagcactgtgcaaacacgaaagtggacgtatacggtgtgacgcctgcccggtgccggaaggttaattgatggggttatccgtaaggagaagctcttgatcgaagccccggtaaacggcggccgtaactataacggtcctaaggtagcgaaattccttgtcgggtaagttccgacctgcacgaatggcgtaatgatggccaggctgtctccacccgagactcagtgaaattgaactcgctgtgaagatgcagtgtacccgcggcaagacggaaagaccccgtgaacctttactatagcttgacactgaacattgagccttgatgtgtaggataggtgggaggctttgaagcgtggacgccagtctgcgtggagccaaccttgaaataccaccctttaatgtttgatgttctaacgttggcccctgaccggggttgcggacagtgtctggtgggtagtttgactggggcggtctcctcccaaagcgtaacggaggagcacgaaggttagctaatcctggtcggacatcaggaggttagtgcaatggcataagctagcttgactgcgagcgtgacggcgcgagcaggtgcgaaagcaggtcatagtgatccggtggttctgaatggaagggccatcgctcaacggataaaaggtactccggggataacaggctgataccgcccaagagttcatatcgacggcggtgtttggcacctcgatgtcggctcatcacatcctggggctgaagtaggtcccaagggtatggctgttcgccatttaaagtggtacgcgagctgggtttagaacgtcgtgagacagttcggtccctatctgccgtgggcgctggagaatagaggggggctgctcctagtacgagaggaccggagtggacgcatcactggtgttcgggttgtcatgccaatggcactgcccggtagctaaatgcggaagagataagtgctgaaagcatctaagcacgaaacttgccccgagatgagttctccctgagactataagtctcctgaaggaacgttaaagacgatgacgttgataggccgggtgtgtaagcgcagcgatgcgttgagctaaccggtactaatgaaccgtgaggcttaaccttacaacgccgaagatgttttggcgatttgagagaattttcagctctgatacagattaatcgatacgttggtgagacgtgttgataaaacagaatttgcctggcggcactagcgcggtggtcccacctgaccccatgccgaactcagaagtgaaacgccgtagcgccgatggtagtgtggggtctccccatgtgagagtagggaactgccaggcatcaaataaagcagaaagcccggtcgaaagaccgggctttttgttttatctgttgtttgtcggtgagcgctctccagagtaggacaaatccgccgggagcggatttgaacgttgcgcagcaacggcccggagggtggcgggcaggacgcccgccataaactgccaggcatcaaacaagtgaagagcccatcctgtcggatgggctttttgcgtttctgtcgtccggccagcgtgccggtatgtctccccggtggcgctgcgcttaccggggctacgggcctgtcgcgttctgtagcccgcaccggtacaccacatcaccaccggtaacgccccgcaatatcattgcccctgtaatcagacaagccttcccccgccagatacgataaactaacgccgattttgcatcaggaagccactatgaaccactccctcaaaccctggaatacctttggcattgaacgcttcgccaagacgatagtacgcgccgaaactgagcaacagttgctaagcgcctggcaaaccgctgccgcggcaggcgaacccacgctgatccttggggaaggcagtaatgtcctgtttctgaacgactatgccggtacggtgatcctcaaccggattatggggatcgaggtgagcgaaacgccggaagcctggcgcttgcacgtcggcgccggcgaaaactggcatcagttggtgcagttcacgctacagcatgcgatgccaggtctggaaaatctggcgttaatccctggctgcgcaggatcttcgccgatccagaatattggcgcctacggcgttgagctacagcgggtttgcgaatatgttgactgcattgagctggaaaccgggcgtaagcaacgtctttcagccgcggaatgccgttttggctatcgcgacagtatcttcaaacatgaatatcaggaccgctatgccatcgtcgcgattggcttatcgttagcgaaaacatggcagcctgtactgagttacggtgatttaacgcgtctcgatccgcagaccgtcacgccgcagcaggtatttgatgcggtctgtcatatgcgaatgactaaattgccggatccaaagattaacggtaatgccggcagcttttttaagaatccgatcgtcagcgctcaggttgcggaagcgctgctggcgcagttccctcatgcaccgcactatccgcaggcaaatggcagcgtcaagctggccgctggctggctaatcgatcaatgtgagctcaaaggacaacgcatcggcggcgcggccgtccatcgacagcaggcgctggtactgattaatgaagatcgagcgaccagcgaggatgtggtgaaacttgctcattatgttcgccagcgggtgggtacgaaattcgatgtatggcttcagcccgaggtgcgcttcattggcacgcatggtgaagtcaacgcagaggagagcattgcgtgaaagaccatactatccctttaacgctaatttctatccttgctgatggtgagtttcactctggcgaacagcttggtgagcagttaggcatgagccgggcggcgattaataagcacatccagaccttacgtgactggggcgtcgatgtgtttactgtgccgggcaagggttacagcctgccggagcctattcatctattagatgagaaaaagatttctcaagagatagaccatggccgagtgacggtccttcccgtcatcgactctactaaccagtatttgctggacaggcttgatgagctgacgtccggagatgcctgtgtggctgaatatcagcaagcagggcgaggccggcgaggcagaaaatggttttcgccctttggcgcgaatctctatctctcgatgtactggcgtctggagcagggcccggcagcggctattggtctaagcctggtgatcggtattgtgatcgctgaagttctgcagcagctcggggccgaacaggttcgcgtgaaatggccaaacgatatttacctgcaggatcgtaagctgtcagggatcctcgtggaactgacggggaaaacgggcgatgccgcacaaatcgtcagcggcgcgggtatcaaccttgtgatgcgtcgcgtggagtctgatgtcgtcaatcaggggtggatcagccttcaggaagcgggggtggtcatcgaccgtaacctcctcgccgcgcgcctgattaaagagctgcgcctgggactggagctgttcgagcaggaaggattggctccctatctaccgcgctgggaaaaactggataactttattcatcgcccggtgaaactgattatcggtgataaagaaatttacggcatttcgcgtggcattgacgcccagggcgcactattgctggagcaggatggtgtaataaaagcctgggtgggtggtgaaatatcattgcgcagtgcagaataaaaaagggagcttcggctcccttattttatttacgtaagcgtacctgattcactgagtgattggcgctcttagtcatgatcaggctagcgcgctcgcgagttggaaggatattttctttaagattcattaggttgatttcattccatagcgaagtggcaatatctaccgcttcttccttcgagagcttagcgtaattatggaaataggaatccggatcggtaaacgccccttcccggaatttaagaaagcggttgatataccagcttttcaataattcttccggggcatcgacataaatagaaaagtcgacaaaatcggaaacgaatacatgatggggatcgtgcggataatccattccactttgcagaacattcagcccttcaagaattaaaatatccggttgcgcgacggttttgtcaccattgggaataacatcataaatcagatgggaataaactggcgcggttgcctgcggtacccctgatttgagatcggagacaaacttcaccaggcgatgcatatcataggactgcggaaagccttttttcttcattaacccacgttcttttaaaaccgagttagggtgcaaaaaaccgtcggtggtaatgagttcgacatggcgatgctccggccaacgactaagcaaagcttgcagaacgcgggcggtggtgctttttcctaccgcaacgctgccagcgatactgataatatagggaattcgctgaccattggtgccaagaaattgttcgagaacagcctggcgacgcaggttagaactgatatagaagttgagcaaacgcgacagcggcaaatagatctcggcaacctcttccagagagagatcttcgttgatgccttttaaccgcgtgatttcttcctcggttaacgtcatcgggacagaatcacgaagtgcagcccattggtggcggttaaattgtaggtacggtgtcattaacgtctgctctttttggctcataagcatgttcttactatcaccgaataccttgaaacggtgatgcttcacacgagttaatcaggacaatgggcaggagggtaacaccagattgccgggaataataagaaaaaaactcattgaatgctgctttctcgcgccagcatcacaagagaagaataagtttcttattctttgcaaagcatggcctttgctaacaggctaggctagcggcctgaatcctttccgtcagcggtcagcatgcgatagaggtaaccggagatgatcggacagcgcctgaagcgccgaattattggcgaatatttgcacttcgctgcttgaaattacaccgttttttcgcgtaagagcacaaaatgtgagcaagagaacgttttatgcaaatttttagttgcatgaactcgctcctctccctagaatgcgcgctacttgatgccgacttagctcagtaggtagagcaactgacttgtaatcagtaggtcaccagttcgattccggtagtcggcaccataacaatttgggtggggttcccgagcggccaaagggagcagactgtaaatctgccgtcatcgacttcgaaggttcgaatccttcccccaccaccactttctggcgacgctttgcggagccggagttggttgggtaaactaatcagctcaatactaaagagagcagtctctttagtattacagaaagaactgggtagccgagtttcaggatgcgggcatcgtataatggctattacctcagccttccaagctgatgatgcgggttcgattcccgctgcccgctccagacgtgctgatatggctcagttggtagagcgcacccttggtaagggtgaggtccccagttcgactctgggtatcagcaccacttcttttctctccttccctgtttctcttctgttatgttcattcaacaagtcgggcatgttgcctggttgatgtggtgatatcaccgatttatccgtgtcttagagggacaatcgatgtctaaagaaaagtttgaacgtacaaaaccgcacgttaacgtcggtactatcggccacgttgaccatggtaaaacaacgctgaccgctgccatcactaccgtactggctaaaacctacggtggttccgctcgcgcattcgaccagatcgataacgcgccggaagaaaaagctcgtggtatcaccatcaacacctctcacgttgaatatgacaccccgactcgccactacgcgcacgtagactgcccgggccacgccgactatgttaaaaacatgatcaccggtgctgcgcagatggacggcgcgatcctggttgttgctgcgactgacggcccgatgccgcagactcgtgagcacatcctgctgggtcgtcaggtaggcgttccgtacatcatcgtgttcctgaacaaatgcgacatggttgatgacgaagagctgctggaactggttgagatggaagttcgtgaactgctgtctcagtacgatttcccgggcgacgacactccgatcgttcgtggttctgctctgaaagcgctggaaggcgacgcagagtgggaagcgaaaatcatcgaactggctggccacctggatacctatatcccggaaccagagcgtgcgattgacaagccgttcctgctgccgatcgaagacgtattctccatctccggtcgtggtaccgttgttaccggtcgtgtagagcgcggtatcatcaaagtaggtgaagaagttgaaatcgttggtatcaaagaaaccgcgaaaaccacctgtactggcgttgaaatgttccgcaaactgctggacgaaggccgtgctggtgagaacgtaggtgttctgctgcgtggtatcaaacgtgaagaaatcgaacgtggtcaggtactggctaagccgggcaccatcaacccgcacaccaagttcgaatctgaagtgtacatcctgtccaaagacgaaggcggccgtcatactccgttcttcaaaggctaccgtccgcagttctacttccgtactactgacgtgactggcaccatcgaactgccggaaggcgtagagatggtaatgccgggcgacaacatcaaaatggttgttaccctgatccacccgatcgcgatggacgacggtctgcgtttcgcaatccgtgaaggcggtcgtaccgttggcgcgggcgtggttgctaaagttctcggctaatcgctgataacatttgacgcaatgcgcaataaaagggcatcatttgatgccctttttgcacgctttcacaccagaacctggctcatcagtgattttatttgtcataatcattgctgagacaggctctgaagagggcgtttatacaccaaaccattcgagcctcagggcgacggctaatcaactccttctttgcaacagcagggcaggggtgacaccaccgtcaacattgaagcaatttgaatagttaagtgtataatccgaaacttaatttcggtttggatcgcctcgcccccgcggggtgaaattgtttgtagaatacttctgacaggttggtttatgagtgcgaataccgaagctcaagggagcgggcgcggcctggaagcgatgaagtggattatcgttgccgtgctgctgatcgtggcgatcgtgggcaacttcctttatcgtgacattatgctggcggtgcgtgcgctggccgtggttattcttattgctgctgccggtggcgtcgcgctgttgacgacgaaaggtaaggcgaccgttgcttttgctcgcgaagcgagaaccgaagttcgtaaagtgatttggccgactcgccaggaaacgctgcatactacgctgattgttgctgccgtgactgcagtaatgtcactgatcctgtggggactggatggtattctggttcgcctggtctcctttatcactggcctgaggttctgagatgtctgaagctcctaaaaagcgctggtacgtcgttcaggcgttttccggttttgaaggtcgcgtagccacgtcgctgcgtgaacatatcaaattacacaacatggaagagttatttggcgaagtcatggtcccgaccgaagaagtggttgagatccgtggcggccagcgtcgcaaaagcgaacgtaaattcttcccgggctatgtcctggttcagatggtcatgaacgacgcaagctggcacctggtgcgcagcgtaccgcgcgtgatgggcttcatcggcggcacctctgaccgtccggcgccgatcagcgacaaagaagtcgacgccatcatgaatcgtctgcagcaggttggcgataagccgcgtccgaaaacgctgtttgaaccgggtgaaatggttcgcgttaacgacggtccgttcgctgactttaacggcgtggtggaagaagtggactatgagaagtcccgcctgaaagtttccgtttctatcttcggtcgtgcgaccccggtagaactggacttcagccaggttgagaaggcgtaagccggcgatcaaaaaagcagcgatttaatcgttgcatagggcgcgaaattggcatacaatttcgcgccttttgtttttatgggcccggcccgtaaaacgatgtttaatcacggggagcttctctgaagcgttaatacccattttgaggatttaagaatggctaagaaagtccaagcctacgtcaagctgcaggttgcagctggtatggcgaacccgagcccgccggtcggcccagcactgggtcagcagggcgtgaacatcatggaattctgcaaagcgttcaacgccaaaactgattccctggagaaaggtctgccgatcccggttgttatcaccgtttacgctgaccgttcctttacctttgttaccaagactccgccggctgctgttctgctgaagaaagctgcaggcatcaagtctggctccggtaagccgaacaaagataaagtgggtaaaatctcccgcgctcagctgcaggaaatcgcgcagaccaaagctgccgacatgactggtgccgacattgaagcgatgactcgctccatcgaaggtactgcacgttccatgggcctggtagtggaggactaagaaatggctaaactgaccaagcgcatgcgcgtgatccgtgagaaagttgatgcaactaaacagtacgacatcaacgaagccattgctctgctgaaagagctggccaccgctaaatttaccgaaagcgtagacgttgccgttaacctcggcatcgacgctcgtaaatctgaccagaacgtccgtggcgcaactgtactgccgcacggtactggccgttccgttcgcgtagccgtatttacccagggcgcaaacgctgaagctgctaaagctgcaggcgctgagctggtaggtatggaagatctggctgagcagatcaaaaaaggcgaaatgaactttgacgttgttattgcttccccggatgcaatgcgcgttgttggccagctgggccaggttctgggtccgcgtggcctgatgccgaacccgaaagtaggtaccgtaactccgaacgttgctgaagcggttaaaaacgcgaaagcaggccaggttcgttaccgtaacgacaaaaacggcatcatccacaccaccatcggtaaagtggactttgacgctgacaaactgaaagaaaacctggaagctctgctggttgcgctgaaaaaagcaaaaccgactcaggcgaaaggcgtgtacatcaagaaagttagcatctccaccactatgggtgcaggtgttgcagtagatcaggctggcctgaacgcttctgcaaactaatgcctttacgtgggcggtgattttgtctacaatcttacccccacgattctgtcaataagacagacgctatgcgagtcatttgaattgcagcaaggcagcaatcgagtgaatcaccgggagtgtagttaactacatgaccggtgtgaacgagagcagctaacgccgctgcgattcgaaggacgaagtcataggaagaatttgttcgttggagcctggcctatccaggcctccgtcgaagaccgcaggtgtttcgcaagaaacttaatcccctgcgtagacggtgacagaacgctaagattatttttggatattctggcttgtttctgctcaccgtatttagacgctcttttcgttgaattgagtgaagtgagttccagagcataggctctggcaaacatccaggagcaaagctaatggctttaaatcttcaagacaaacaagcgattgttgctgaagtcagcgaagtagccaaaggcgcgctgtctgcagtagttgcggattcccgtggcgtaactgtagataaaatgactgaactgcgtaaagcaggtcgtgaagctggcgtatacatgcgtgttgttcgtaacaccctgctgcgccgcgtcgttgaaggtactcagttcgagtgcctgaaagacacgtttgttggtccgaccctgattgcatactctatggaacacccgggcgctgctgctcgtctgttcaaagagttcgcgaaagcgaatgcaaaatttgaggtcaaagccgctgcctttgaaggtgagctgatcccggcgtcgcagatcgaccgcctggcaactctgccgacctacgaagaagcaattgcacgcctgatggcaaccatgaaagaagcttcggctggcaaactggttcgtactctggctgctgtacgcgatgcgaaagaagctgcttaatcgcagttatctttgtaaagcattcgcttacgtataaacttattctgatattcaggaacaatttaaatgtctatcactaaagatcaaatcattgaagcagtatccgctatgtccgtaatggacgttgttgagctgatctctgcaatggaagaaaaattcggtgtttccgctgctgctgctgtagctgtagctgctggcccggttgaagctgctgaagaaaaaactgaattcgacgtaattctgaaagctgctggcgctaacaaagttgctgttatcaaagcagtacgtggcgcaactggcctgggtctgaaagaagctaaagacctggtagaatctgctccggctgcactgaaagaaggcatcagcaaagacgacgctgaagctctgaaaaaatctctggaagaagctggcgctgaagttgaagttaaataagccaacccttccggttgcagcctgagaaatcaggctgaggctggtgactttttggtcaccagcctttttgcgctgtaaggcgccagtagcgtttcacgctgtttgactactggtttgcctctcaatgcttgtttctatcgacgacttaatatactgcgacaggttagggttcctgggctgtgtaaatcgcaatgaaatggtttaagcgtgatagcaacaggcattgcggaaagtgttccattttccggtcaacaaaatagtgttgcataaaaaactgccctctgcgggcagatgggtcgacttgtcagcgagctgaggaaccctatggtttactcctataccgagaaaaaacgtattcgtaaggattttggtaaacgtccacaagttctggatgtgccatatctcctttctatccagcttgactcgttccagaagtttatcgagcaagatcctgaagggcagtatggtctggaagctgctttccgttccgtattcccgattcagagctacagcggtaattccgagctgcaatacgtcagctaccgtctgggcgaaccggtttttgacgttaaagaatgtcagatccgtggcgtgacttattctgcaccgctgcgcgtaaaactgcgtctggtgatctacgagcgcgaagcgccagaaggcaccgtcaaagacattaaagaacaagaagtctacatgggcgaaattccgctcatgaccgacaacggtacctttgttatcaacggtaccgagcgtgttatcgtttctcagctgcaccgtagcccgggcgtcttctttgacagtgacaaaggtaagacccactcctccggtaaggttctgtataacgcacgtatcatcccttaccgcggttcctggctggacttcgaattcgacccgaaagacaacctgttcgttcgtatcgaccgtcgtcgtaagctgccggctaccatcatcctgcgcgcgctgaattacaccactgagcagatccttgacctgttcttcgaaaaagtggtctttgaaattcgcgacaacaagctgcagatggagctgattccggagcgtctgcgcggtgaaactgcctccttcgatatcgaagccaacggcaaagtgtacgttgagaaaggccgtcgcatcacggctcgtcatatccgtcagctggaaaaagacgatatcaagcatatcgaagtgccggttgaatatatcgcgggcaaagtggcggctaaagactatatcgatgaagcgactggcgaactgatctgcccggcgaacatggagctgagcctggatctgctggctaagctgagccagtctggccacaagcgtatcgaaacgctgttcaccaacgatctggaccacggcccgtacatctctgaaacggtacgcgtcgacccgactaacgatcgtctgagcgcgctggtagaaatctaccgcatgatgcgccctggcgagccgccgactcgtgaagccgctgaaagtctgtttgagaacctgttcttctctgaagaccgctacgatctgtccgcggttggtcgtatgaagttcaaccgttctctgctgcgcgacgaaatcgaaggttccggtatcctgagcaaagacgacatcatcgaagtgatgaagaagctcatcgatatccgtaacggtaaaggcgaagtggacgatatcgaccacctcggcaaccgtcgtatccgttccgttggcgaaatggcggaaaaccagttccgcgttggcctggtacgtgtagagcgtgcggtgaaagagcgtctgtctcttggcgatctggataccctgatgcctcaggatatgatcaacgccaagccgatttccgcagcagtgaaagagttctttggttccagccagctgtctcagtttatggaccagaacaacccgctgtctgagattacgcacaaacgtcgtatctccgcactcggcccaggcggtctgacccgtgagcgcgcaggcttcgaagttcgagacgtacacccgacccactacggtcgcgtatgtccgatcgaaacgcctgaaggtccaaacatcggtctgattaactccctgtccgtgtacgcgcagaccaacgaatatggcttccttgagacgccgtatcgtaaagtgaccgacggtgtggttactgacgaaattcactacctgtctgctatcgaagaaggcaactacgttatcgctcaggcgaactccaacctggatgaaaacggccacttcgtagaagatctggttacctgccgtagcaaaggcgaatccagcttgttcagccgcgaccaggttgactacatggacgtatccacccagcaggtggtatccgtcggtgcgtccctgatcccgttcctggaacacgatgacgccaaccgtgcattgatgggtgcgaacatgcaacgtcaggcggttccgactctgcgcgctgataagccgctggttggtaccggtatggaacgtgctgttgccgttgactccggtgttactgccgtggctaaacgtggcggtaccgttcagtacgtggatgcttcccgtatcgttatcaaagttaacgaagacgagatgtacccgggcgaagcaggtatcgacatctataacctgaccaagtacacccgttctaaccagaacacctgcatcaaccagatgccttgcgtgtccctgggcgaacctattgagcgcggcgacgtgctggcagacggcccgtccaccgacctcggtgagctggcgctgggtcagaacatgcgtgtagcgttcatgccgtggaacggttacaacttcgaagactccatcctcgtttccgagcgtgttgtccaggaagaccgtttcaccactatccacattcaggaactggcgtgcgtgtcccgtgacaccaagctggggccggaagagatcaccgctgacatcccgaacgtgggtgaagctgcgctctccaaactggatgaatccggtatcgtttatatcggtgcggaagtgaccggcggcgacattctggttggtaaggtaacgccgaaaggtgaaacccagctgacgccggaagagaaactgctgcgcgcgatcttcggtgagaaagcgtctgatgttaaagactcttctctgcgcgtaccgaacggtgtctctggtaccgttatcgacgttcaggtctttacccgtgacggcgtagaaaaagacaaacgtgctctggaaatcgaagagatgcagctgaagcaggccaaaaaagacctgtctgaagaactgcagatcctcgaagccggtctgttcagtcgtatctacgcggtgctggtctccggtggcgttgaagctgagaagctcgacaagctgcctcgcgatcgctggctggaactgggcctgaccgacgaagagaaacaaaatcagctggaacagctggctgagcagtatgacgaactgaaacacgagttcgagaaaaaactcgaagcgaaacgccgtaaaatcacccaaggcgacgatctggcaccgggcgtgctgaagattgttaaggtatatctggccgttaaacgccgtatccagcctggtgataagatggcaggtcgtcacggtaacaagggtgttatctctaagatcaacccgatcgaagatatgccgcacgatgctaacggtacgccggtagatatcgtactgaacccgctgggcgtaccgtctcgtatgaacatcggtcagatccttgaaactcacctgggtatggctgcaaaaggcatcggcgataagatcaacgccatgctgaagcagcagcaggaagtcgcgaaactgcgcgaattcatccagcgtgcttacgatctgggcgctgacgttcgccagaaagttgacctgaataccttcagcgatgaagaagttctgcgtctggctgaaaacctgcgtaaaggcatgccgatcgcaacgccggtattcgacggtgcgaaagaagctgaaatcaaagagctgctgcagctgggcgacctgccgacttccggtcagatcaccctgtttgatggccgcaccggtgaacagttcgaacgtccggtaaccgtgggttacatgtacatgctgaaactgaaccacctggtcgacgacaaaatgcacgctcgttccaccggttcttacagcctggttactcagcagccgctgggtggtaaggcacagttcggtggtcagcgcttcggtgagatggaagtgtgggcgctggaagcatacggcgcggcctacaccctgcaggaaatgctcaccgttaagtctgatgacgtgaacggtcgtaccaagatgtataaaaacatcgtggacggcaatcaccagatggaaccgggcatgccggaatccttcaacgtactgttgaaagaaattcgctcgctgggcatcaacatcgaactggaagacgagtaattctcgctcaaacaggtcactgctgccgggttaacgcccggcagcggaatgtgctaactccgacgggagcaaatccgtgaaagacttattaaagtttctgaaagcgcaaactaaaaccgaagagtttgatgcgatcaaaattgctctggcttcgccagacatgatccgttcatggtctttcggtgaagttaaaaagccggaaaccattaactaccgtacgttcaagcctgagcgtgacggccttttctgcgcccgtatctttgggccggtaaaagattatgagtgcctgtgcggtaagtacaagcgcctgaaacaccgcggtgtgatctgtgagaagtgcggcgttgaagtgacccagactaaagtgcgtcgtgagcgcatgggccacatcgagctggcatgtccgactgcgcacatctggttcctgaaatccctgccgtcccgtatcggtctgctgctggatatgccgctgcgcgatatcgaacgtgtactgtactttgaatcctatgtggttatcgaaggtggcatgaccaacctcgaacgcaaccagattctgacggaagaacagtacctggacgcgctggaagagttcggtgacgaattcgacgcgaaaatgggcgcggaagcgatccaggcgctgctgcgcaatatggatctggagcaggaatgcgagcagctgcgtgaagagctgaacgaaaccaactccgaaaccaagcgtaaaaagctgaccaagcgcattaagctgctggaagctttcgttcagtctggcaacaagccggagtggatgatcctgaccgttctgccggtactgccgccagatctgcgtccgctggttccgctggacggtggtcgtttcgcgacgtctgacctcaacgatctgtatcgtcgcgtgatcaaccgtaacaaccgtctgaaacgtctgctggatctggctgcgccggatatcatcgtacgcaacgaaaaacgtatgctgcaggaagcggttgacgccctgctggataacggtcgtcgcggtcgtgcgatcaccggttctaacaaacgtcctctgaaatctttggccgatatgatcaaaggtaaacagggtcgtttccgccagaacctgctcggtaaacgcgttgactactccggtcgttctgttatcaccgtaggtccatacctgcgtctgcatcagtgcggtctgccgaagaaaatggcgctggagctgttcaaaccgttcatctacggcaagctggaactgcgtggcctggccaccaccatcaaagccgctaagaagatggttgagcgcgaagaagctgtcgtttgggatatcctggacgaagttatccgcgaacacccggtcctgctgaaccgtgcgccaaccctgcaccgtctgggtattcaggcattcgaaccggttctgatcgaaggtaaagccatccagctgcacccgctggtttgtgcggcatacaacgccgacttcgatggtgaccagatggctgttcacgtaccgctgacgctggaagcccagctggaagcgcgtgcgctgatgatgtctaccaacaacatcctgtccccggcgaacggcgaaccaatcatcgttccgtctcaggacgttgtactgggtctgtactacatgacccgtgacagtgttaacgccaaaggcgaaggcatggtgctgactggcccgaaagaagctgagcgtatttatcgcgccggcctggcctctctgcatgcgcgcgttaaagtgcgtatcactgaatacgaaaaagacgacaatggtgagtttgtcgcgaaaaccagcctgaaagacacgaccgttggccgtgccattctgtggatgatcgtaccgaaaggtctgccgttctctatcgtgaaccaggcgcttggtaagaaagcgatctccaagatgctgaacacctgttaccgtattctgggtctgaaaccgaccgttatttttgcggaccagacgatgtacaccggctttgcttacgcagcgcgttcaggtgcatccgttggtatcgatgacatggtcatcccggagaaaaaatacgaaatcatcagcgaagcggaagcggaagttgctgagattcaggaacagttccagtccggtctggtgaccgcgggcgaacgctacaacaaagttatcgatatctgggctgcggcgaacgatcgtgtatccaaagcgatgatggataacctgcaaaccgaaaccgtgattaaccgtgacggtcaggaagagcagcaggtttccttcaacagcatctacatgatggccgactccggtgcgcgtggttctgcggcacagattcgtcagctggctggtatgcgtggtctgatggcgaagccggatggctccatcatcgaaacgccgatcaccgcgaacttccgtgaaggtctgaacgtactccagtacttcatctccacccacggtgctcgtaaaggtctggcggataccgcactgaaaacagcgaactccggttacctgactcgtcgtctggttgacgttgcgcaggacctggtcgtcactgaagacgactgcggcaccctggaaggcatcaccatgacgccggttatcgaaggtggcgacgttaaagagccgctgcgcgatcgcgtactgggtcgtgtgactgcggaagatgttctgaagccgggtaccgcggatattctggttccacgcaacacgctgctgcatgagcactggtgtgacctgctggaagcgaactccgttgactccgtcaaagtgcgttccgttgtatcctgtgacaccgactttggcgtctgcgcgcactgctatggtcgtgacctggcgcgtggccacctcatcaacaaaggtgaggctatcggcgttatcgcggcacagtccatcggtgagccgggtacacagctgacgatgcgtacgttccacatcggtggtgcggcatctcgtgcggctgctgaatccagcatccaggtgaaaaacaaaggtagcatcaagctcagcaacgcgaagtcggttgtgaactccagtggtaagctggttatcacttcccgtaataccgagctgaagctgatcgacgaattcggtcgtaccaaagagagctataaagtaccttacggtgcggttatggcgaaaggcgacggtgagcaggttgccggcggtgaaaccgtcgcaaactgggatccgcacaccatgccggttatcaccgaagttagcggtttcatccgtttcactgacatgatcgacggtcagaccattactcgtcagactgacgagctgaccggtctgtcttcgctggtggttctggactctgcagaacgtaccgcaggtggtaaagatctgcgtccagcactgaaaattgttgatgctcagggcaacgacgttctgatcccaggcactgatatgcctgctcagtacttcctgccgggtaaagcgattgttcagctggaagatggcgtacagatcagctcgggtgacaccctggcgcgtattccgcaggaatccggcggtaccaaggatatcaccggtggtctgccgcgcgttgcggacctgttcgaagcacgtcgtccgaaagagccggctatcctggctgaaatcagcggtatcatttccttcggtaaagaaaccaaagggaaacgtcgcctggttatcaccccggtagacggtagcgagccgtacgaagagatgatcccgaaatggcgtcagctcaacgtgttcgaaggtgaacgtgtggaacgtggtgatgtggtttccgacggtccggaagcaccgcacgacattctgcgtctgcgtggcgtacatgctgtgacccgttacattgttaacgaagtccaggacgtataccgtctgcagggcgttaagattaacgataagcacatcgaagttatcgttcgtcagatgctgcgtaaagccaccatcgaaagcgcaggcagctccgacttcctcgaaggcgagcaggtggaatactcccgcgtcaagatcgcgaaccgcgaactggaagcgaacggcaaagtgggcgcaacgttctcccgcgatctgctgggtatcaccaaagcgtctctggccaccgagtccttcatctccgcggcatcgttccaggagaccactcgcgtgctgaccgaagcagccgttgcgggcaaacgcgacgaactgcgcggtctgaaagagaacgtcatcgtgggtcgtctgatcccggccggtaccggttatgcgtatcaccaggatcgtatgcgccgtcgcgctgctggcgagctgccggcggcaccgcaggtgagcgtggaagaagcgtctgccaacctggcagagctgctgaacgcaggtctgggcggttctgacaacgattaatcgttgatgcactgctaaaaagccggtcaggtttcctgaccggctttttttattgtctatttttcgccgctttcccggcccttaattacatttacgacatattaaatcttcattttcttagcaattaattcatgcaaaatatctattagaagcctttttctaaaacctttctttatgtatgggtaaaacttctactcatatcaaaaaataatcaattcaaagggtatatattcaaaatacctgatgaatcatgggattacttctgttgctgtatcttcggcgcgacggcgctggagagggatagccgcatctcatgcttctcccggtctggcgcagaaataatcccgagaggcaggtagggatcatttttagatctgagtggacaggctctgggggctgcatggaattcgcgatacaactcattattatattaatttgtctgttttatggtgcccgaaaaggggggattgcgctggggttgctgggcggcatcggtttggtgatcctcgtctttgtttttcatctccagccgggcaaaccgccggttgatgtgatgctggtgatcattgcagtggtagccgcctcggcgaccctgcaggcgtccggcgggttagacgtgatgctgcagattgccgagaagctgctgcggcgtaacccgaaatatgtttctatcgtggcgcctttcgtcacctgcacgctgaccatcctctgcggtaccggccacgtggtgtataccatcctgccgattatctacgatgtggcgattaagaataacattcgtccggagcgtccgatggccgccagctccattggcgctcagatggggatcatcgccagcccggtctcggtggcggtggtatcgctggtggcgatgctgggaaattttacctttaacgggaaacacctggagtttctcgatctgctggcgataaccattccgtccacgctgctgggtattttagccatcggtatcttcagctggttccgcggcaaagacctggatcaggacgaagccttccaggcgtttattgcgctcccggagaaccgccattacgtctatggcgatacggcgacgctgctggacaaaaagctgccgaccagcaactggatagcaatgtggatttttctggcctctatcgccgtggtggcgctgcttggcgctttttctgaactgcgcccggcctttgacggtaaaccactgtcgatggtgctggttatccagatgtttatgctgctctccggagcgctgatcatcatcattacaaaaactaacccggcatcgatttccaaaaatgaggtctttcgttcgggaatgatcgctatcgtcgcggtgtacggcatcgcgtggatggcggagaccatgtttggcgcgcacatgaccgagattaaaggcgtgcttggtgaaatggtaaaagagtatccgtgggcttatgccatcgtgctgctactggtttcgaaatttgtgaactcccaggcggcagcgctggcggcgattgtgccagtagccctggccatcggcgtcgacccggcctatatcgtggcttctgcgccggcctgctatggctactatattctgccgacctacccaagcgatctggcggcgatccagtttgatcgctcagggaccacccatatcggccgctttgtgattaaccacagctttatcctgcccgggctcatcggcgtcggcgtctcctgcgtgtttggctgggtattcgcggcgatgtacggctttctgtaagaaggacgggcgccgacagcgacgcccgttaaatccgtgagattattgcgcgaggggcagacgacgatagagttcaatcatgtcggtcgccagatcctgaatgaccatagcgttcatcagatggtcctgggaatgcacggtgatcaagttgaccggcaatttaccgctgccttcatccatgccgataagctgggtctgaattttatgcgcatgtttgacgaactcatgggattcagccatggcctgctccgcggcgacaaaatcgcctttgcgcgccagctgtagcgccgtcagcgccgcgctacgtgcggaacccgcgttaaccagcagctccatgatgatcgtttctaaatcttccatcgattactccagcatcttaagggctttatccagaacggcatcacctttcatcatgccgtagtccatcatatcgatcacggcgaccttcttgccgaacgggtcggccagcgcctgcagcttcgcctgctcatatttcacctgcgggccgagcaaaataatgtcggcggcggccagattatctttaaactcagcgaccggtacggccttgatagagacctcaacacccttcttctgcgcggcatcttgcatacgctgaaccagcatgctggtagacataccggcggcacagcacaaaacgatattcttcatagtcagtggcccttgtgttccgtgatgtcttatctttatcgcggccctggcgatgcgacaaccgctttaccgtgattgtgtgtaaggcatcacacaataattgaaaccggtttcattttttccggaaaaaataaaaaagcccaccgaagtgggcggtggcggcgctgaagtcttacgcgcgcaggatacggtttttaccctgctgtttggctttgtacagcgcttcatcgacgctcaccaccagcttatccagtggctccatattccattccccaagtccggcgctgaaggtgaccgtcaggccatcttcgcgccaggtgcgtcgttcgacgtttatccgccatgtttccaacagcgtgcgggcgttatcgatatgttcggcaggaaagaccaccgcgaactcttcaccgccgtagcgatagagggatatctccagcggctggaggacctgtagcccttcgcgagcgacgttacgcaggacgatatcgccattgagatggccccaggtgtcgttgatcgatttaaagttatcgatatcgaccagcgcgagggcgaacggctggtgatcgttcatcagggcggcaatatcgctgtcgaaggcgcggcggtttttgcagccggtgagagcgtcgatggtcgcctggcggacgtaggacagttcgcgctgtttattagtttcaatcgctttactcagcatcgcctcaaggcgcggggcgcgtttgacgtcaccggttttaatcgcattgatgatattcatcagcacggtacgggaagcatgacgcagataaagaccgaacaggataataatgatcgctgcgagagtgaaaccgccgatcactaaattggtctcatgacgtgtcagattgaccagggtggcgttatcgacacggaaaatcacaaaccagtcgggattggtaaaggagtaatagtaataccaggtgtcgctcccgggatcgtaaagctgcccctctccgctggtcattttatccatcagctcgtccctgacgaagggtttaaacagcgcgcccgggtcggagtgcaggaccactttgccatcccgttgcaccacaaaaaattccccctgtacgggcgccaccatctggcgcagcgcgaaccccatggaggtgagatcgagatgaaaggccaggctgcccttgagtttcccttccggggtaatgatgggtttgaaaatggtaatcgtcggatggtgggtgaaataatccatatacggactggtgtagtggctgaaggtgctggcttccgcctgtttgataaaccagggccgcgttctgggatcgaaagcccggctgtcttcgttttccagcacctccggggcgcgcagatagtggccctcggtatccgccagcgagatggatgagacgcttggcatcatgttctgtaactgcatcagcgtggttaaccctttctccggctccacattgactgcgcgattcagttcgtcattgcgggcaaagaaggcggctgcgcgcccgaggataaaatcattttcccgcagcagggtttccgtatagttgatcgccaggttatgggtaaaattgcggttaatatcgtgataatcttcgagaaaatctttctgttgcgccagagtcacaaaaatagcgatcagcataaagctgagcaaaataccggcaaaccccacgacgatcggcgtcgtaaaagagagctttctgttgtgtagagccatgaatcgttaatcgtcccggatgtataaaccatgggtccgaacgcaggttgcgtctgggacgcctgccgatcgaatcagttcactattgctcaattataactctgaggccttcatgtatcgtgatttatattcggcgataatgtgcaggcctctgctcagcgcggagaggcagggcgaaaatgaggaagaaaaggttcgccctggtcagcgtccgctgctgaccagggcagaatagaaaaacggcgtcgggcgggccagcctccgtttttcatctctcgtgcaggcgcgcaaaattatcaggcgtttacactgtacatcatgaggtttgcgaagcgcgtcccagccagctatcccagtctttccataccggctgcaggccgcgggcggccagcgcgctggcgacctcttcagggcggcgatcgtcgtgcggggcaaattgctcgagctccggatgatcgtcggcgtagccgccgggctgggttttagagaaggcgctgacgttattgatcgccagcgggatcacccggtcgcggaaccagggggattcgcgggtggatagcgacagctcaacctctggcgccagcaggcggaaggcgcagatagtttgcactagctggcgctcatccatcagcgaagccggttcaataccgccggcgcagggacgcaggcgcgggaaggagaccgaatagcggctgcgccagtagcgctgctgcagccacagcaggtgctcagcgactataaagcagtccactcgccagctgtcggaaaggccgatgagcgcgccaaggccgatcttatcgatccccgccgcgcctaagcgatccggtgtatccagccgccagaagaaatcctgcttttttcctttcagatggtgttgggcgtacatgctttcatgataggtctcctgatagaccatcaccccgtcgagccccagggttttcagctcggcatactcttcagtcgccagcggctgcacctccatatgcagcgaggcaaactggctgcggatagccggtaggtgctgacggaaataatccattcccaccttaccctgatgttcgccggtcaccagcagcagatgctcaaagcccaggttgcggatcgcggcgcactcgcgggcaatctcggcggcatccagcgtcttgcgcttaatgcggttgctcatcgagaagccgcagtaggtacagtcgttagcgcacaggttggagagatacagcggcacgtagaagctgacggtattgccgaagcgctgccgggtgaggcgctgcgcgcgctgggccagcggttcaaggtaattggccgcgacaggcgagagcagggccatcatatcgtcgcgggtgagctgtttagccgccagcgcccgttcgacgtcggcggcggttttgctgttgatgcgcaggcggatatcgtcccactccagctgccgccagcgatcgctaaaggttttcatgccagcgcctccaggaatccggtgagcgggctggtggcctgcgcctgcgtactgcgtgcccccggtccggcctgacgcgccagtaatccggcatcgatcgccatacggaaggcgcgggccatggccacggggtcgtcggcgacggcaatggcggtattgaccagcaccgcgtccgcgcccatctccagcgcctgcgccgcatggctcgggacgccgatcccggcgtcgaccaccaccgggaccgtcgcctgctcgataataatctccagcatggctttggtttccagcccctgattggagccgatcggcgcacccagcggcatcaccgccgcgcagcccacctcttccagtcgtttacacagcaccggatcggcgccgcagtagggcagcaccacgaacccttcgcggaccagcagctccgccgctttcagggtttcaatcgggtcgggcagcagccagcgggcgtccgggtggatctccagcttcagccagtgggtacccagggcttcccgcgccagacgggcggcaaacaccgcctcttccgccgtcttggcgcccgaggtattcggcagcaggctgactcccgccgccagcagcggggcgaggatggcgtcattgcgctggcgtaaatcgacgcgcttcatcgccagggttaccagctggctgcccgaggcgcgaatcgcctcgaccatcaccttcggggcggcgaatttgccggtaccggtgaaaagatgggattcaaacgttttgtctgcaatacgtaacatgtcagcctccagcgataacctgaaaaagcaggacccgatcgccttcctgcaagagatgatcttcccaccggtcgcgcggcaggatgtgttgattgagcgccagcgcaacgccaggctgctgctgttcgagctgggtcagcagggcgctgacgctgagattgtcggcgcacgccagcggctcgtcgttaaaccagatctgcatgccgccctccgcacaccgggcagctccgggaacgctgtagcgcaagggcgcgccagttgctggtgcgggcgtcgaacagccgcagggtgttgcgcggcgtcgccatgccgctgagcagcttaattgtctccagcgcctgcagggtgcccatcatgccgaccaccgggccgacgatccccgcggtgcggcagttgcgctgcggttcatcgctttccggccacaggcagcgatagcagccctgcgtccagggcggggtgagcaccatcagctgaccgccgaagcccacggcgctggcggtcactaacggggtatcgagggccacacaggcggcattgatcgcctggcgggtgaccatattatcggtacagtccagcaccacgtccgctttcgccacttcggcgcgtagcgcctcgccgcttaagcgctgctggagcgctaccagtttgatctgcgggtttagctggctgagccgggtctgtgccgctgcggcttttggccgatcgatatccgcgctggtgaacaagatctgccgttgcaggttgctgagatgcaccgcgtcgtcatcggccagggtcagcgtcccgacgccagccccggccagatagagcgccgccggggagcccagcccgccaaggccgataatcagcactcgactggctaacagcttctgctgcccttcgatggcaatatcctccagcagcagctggcggctatagcgcataaagtcgtgatcattcatcgcccgctcccgccagcgccagcagttggtcggtcgctgcccgccagtccgccgcctgggtgatggcgctgaccaccgcgatgctgccgacgccggtcgccagtacccccggcgccttttccaggctaattccgccgatcgccacggtggggtaatccgccaggcgttgaatatgtctggcaagctgctcgaggccctgcggcgcggaaggcatctgtttggtttgcgtcgggaagacgtgacctagcgcgatgtaagaggggcgcgccgcaagggcgacatcaatttccatatcatcgtgagtagagacgccaagacgcagcccggcctggcggatagcgctcagatcggtggtttccagatcttcttgtccgagatgcacgccataggcctggtgcttaatcgccagttgccagtaatcgttaatgaacagtcgggcgtgatagcggcgaccaagggcgatggcggcgatcacgtcatcctcaacttcgctgtcgcgccggtctttgatgcgtaactgaagggtacgtaccccagcttcgagcaggcgctcaatccacgccacgctgtccaccaccgggtagagtccgagacgaaacgggacgggtggaaaatcaggttgatacatcaggcttcctcctgtttcaggtagatttcgccgccgcgggcgcggaagttattcgacatatcggccatgccggcttcgatactttgcttcgcggcgtagtcgcggacctcctgagtgattttcatcgaacagaatttcggcccgcacatggagcagaagtgggcgactttgccggactcctgcggcagggtttcatcgtgataggcccgcgcggtgaacgggtcgagcgcgaggttgaactggtcttcccagcggaattcaaaacgcgcttttgacatcgcgttgtcgcggatctgcgccccggggtggcctttcgcgaggtcggcggcgtgggcggcgattttgtaggtaatcagcccctgtttgacatcctctttgttgggcaggccgagatgctctttcggcgtgacatagcacagcatggcgcagccgaaccagccgatcattgccgcgccgataccggaggtgaaatggtcgtagcccggcgcgatatcagtggtgagcggccccagggtgtagaatggcgcttcgtggcagtgctccagctgttcggtcatattgcggcggatcatctgcatcggtacgtggccagggccttcaatcatcacctgcacgtcatattcccaggcgattttcgtcagttcgccgagggtgcgcagctcggaaaactgcgcctcatcgttggcatcctgaatggagccggggcgcaggccatcgcccagcgacagcgacacgtcataggcggcgcagatttcgcagatttcgcggaaatgctggtagaggaagttttcctgatgatgcgacaggcaccacttagccatgattgagccgccgcgcgagacgataccggtcaggcgcttcgccgtcatcgggacgtagcgcaacagtacgccggcgtgaatcgtgaagtagtcgacgccttgctcggcctgttccagcagggtatcgcggaagacttgccaggtgagattctcggcgatgccgttgaccttctccagcgcctggtaaatcggcacggtaccaatcggcaccgggctgttgcgcaggatccactcgcgggtttcgtggatatagcggccggtggagaggtccatcaccgtgtcggcgccccagcgggttgaccagaccagtttctcgacctcttcttcgatggaagaggtcaccgccgagttgccgatattggcattcactttcaccaggaagttgcggccgataatcatcggttcagactccgggtggttgatgttggcggggatgatggcgcgtccggcggccacttcatcgcgaacaaactcgggggtgatgttttccggaaggtgggcgccgaagccttcacctgcgtgctgctggcgcagaacctcgctgcggatacgttcgcgacccatgttttcgcgaatggcgatgaactccatctccggggtgactatcccctggcgggcgtagtgcagctgggtaacgcatttgccagcgacggcgcgtttgggcgtcagcaggccgctgaagcgcagctcatcgagaccgtcgtcggccagccgcgctttggtataggccgagctgcgttcgctgagcggcgcgcagtcgttacgcgcgtcgatccacggctggcgcagctttgccagcccctggcggacatcaatgctaatatccgggtcgccatacggcccggaggtgtcatacaccgggatcggttcgttggtttcgtaccggggtttatctttatcgccgccgacgagagttgggctgagctgaatttcacgcatcgggacgcggatatccgcttgtgagccgtgaacatagatgcggcgtgaattaggaaaagcggtacccgccagcgtatcaatgaatcgctgcgcgtgctcgcgttgttcccgacgggttagtttggtagtagacatagcgcattccagttaaaaaaggacatggcttgtcagacgacggatggagtaacagatgcgatcggccctgacggactgacgcgaacagcagtttactcttgttcccttcgcaggtattagcctgatcaggttccgcggatcccgaattaacggtctcagccttttccacgttagcctgcgcatggaaaataggcactccgacaagatgaaatccctccgcagagggataatgtacgtaaattacgcgttaacggttcacaactcaagcggtcggcgcaatattatcgcgcacgtcattgctcaggttatgggcgacagccagggcgatcagtttatcttccagcgcgaaacgcgcctccagcgactcgccgatatccgacagcgcctgctgaaattcaagatagttatcgtgatcgatggcgttttcgaggcaggtatcgtagtagtccatcatctgctgggtattggcttccagctgcgggtaaagccgggtggcggctaaaagaggggtatcgccttccatttcgccaataatgcgttcataaatactaaaatgaccggatgagaggtaatccaccagactttggcaaaagtcatccagcgccttttcgtttagccgcataaacgactctttgcccggtttcaggccaaccaggttgtagtaagccacgagcagatgcttacgcacttgtagccagcgatcgaccagttcattactaccgccaacgcgctccgtcagattttccagctggtttagcatgattgactccgctagttttgatttaaatctgctcaccaaaatgtaaatataatgttaacaacatgccagtgaagcaaaggtagtgcaatagatatggatcgtattattgaaaaattagatcgcggctggtgggttgtcagtcacgaacaaaaattatggttgcctggtggagaattaccacatggcgaagcggttaatttcgatcttgtcggccagcatgcgctgcatattggcgagtggcagggcgagtccgtgtggatggtgcgccaggatcgtcgccatgacatgggatcgttgcgccaggtgctggatcaggatccgggactcttccagctggctgggcgggggatccagctcgccgaattttatcgctcgcataaattttgcggttactgcggccacccgatgcatgccagcaaaagcgaatgggcgatgctgtgcagccactgccgtgaacgttactacccgcaaattgccccctgcattatcgtggcaatccgtcgcgacgatgcgatcctgctggcgcaacatacgcgccatcgcaacggcgtgcacaccgtgctggccggctttgtcgaggtcggcgaaacccttgagcaggcggtggctcgcgaggtgatggaggagagcggtattcgggtaaaaaatctgcgttacgtgacctctcagccatggccgttcccgcagtcgctgatgaccgcctttatggcggattacgcagatggcgagatcgtggtcgacaaaaaagagttactgaccgcggactggtatcgctatgacgacctgccgcttctgccgccgccggggacagtggcgcggcggcttatcgaagataccgtcgcgatgtgtcgggcagagttcgagtgacatgttacactgggcgtatcaacgctaaaggaatgtaaaaatgaccgaactgaagaacgatcgttacctgcgcgcgctgctgcgtcagccggttgatgtcaccccggtgtggatgatgcgccaggcgggccgctatttaccggagtacaaagccacccgtgcgcaagcgggcgactttatgtcgctgtgtaaaaatgccgagctggcctgcgaagtgactctccagccgctgcgccgttacccgctggacgcggcgatcctcttttcggacatcctgaccatcccggacgccatggggctggggctgtactttgaagctggcgaaggtccgcgcttcacctcgccggtaaaaagtaaagccgacgtcgacaagctgccgatcccggatccggagcaggagctgggctatgtaatgaacgccgtgcgcaccattcgccgcgaactgaaaggcgaagtgccgctgatcggtttttccggtagtccatggacgctggctacgtacatggtggagggcggcagcagcaaggctttcaccgtgattaaaaagatgatgtacgccgagccgcaggcgctgcatgcgctgctggataagctggcgaagagcgttaccctgtatctcaacgcgcagatcaaagccggcgcgcagtcggtgatgatttttgacacctggggcggggtgctgaccggccgcgactatcagcagttctccctctactacatgcataagatcgtcgatggcctgctgcgggaaaacgaaggccgccgcgtgccggtgactttgttcaccaaaggcggtggtcagtggctggaagcgatggcggagaccggctgcgatgcgttgggtctcgactggaccaccgatattgccgatgctcgccgtcgcgtgggtaacaaagtagcgctacagggcaatatggatccgtcgatgctctatgcgtccgccccgcgtattgaagaagaagtggcgactattcttgccggctttggccagggggaaggccacgtctttaaccttggacacggtattcatcaggacgttgaccccgagcatgcgggcgtctttgttgaggctgtgcaccgtctgtccgcaccctatcaccagtaggagataagccctatggatttagccgcactacgtacccaacagcaacagttagccgcgtcggtagagcgtgcggatcgactggatcgcgacccgccggcgttgatcggcggcgcggacgtcgggtttgagcaggaaggggagatcacccgggctgcgatggtgctgctgacctggcctgagcttgagctggtggagtatcaggtggcgcgggtcgccacctctatgccctatattcccggctttctctcgtttcgcgaaacgcctgcgctgctggcggcgtgggagcagctttcgcaaaaaccggacctgctcttcgttgacggacacggcatttctcatccccggagattgggcgtcgccagccattttggcctgatgattgatgtgccgactatcggagtggcgaaaaaacgcctgtgcggcaaaatcggcgacctgggtgatgagcctggcgcgctggccccgctgatggataaaaatgagcaactggcctgggtctggcgcagcaaagtgcgctgcaacccgctgtttattagcaccggccaccgggtaggcatggacagcgctttaatgtgggttgagcgctgcatgcgaggctaccgtctgcccgagccgacgcgctgggccgatgcggtggcgtcccgtcgtccgtcgtttgtgcgttggcaagcaaatcacagctgattcaggtacactgcgcctaatttctgacttcgagaattcatcatgttacaaaacccgattcacctgcgcctggagaagctggaaagctggcagcatgtcacttttatggcctgcctgtgcgaacgtatgtatcccaactacgcgatgttctgcaagcaaaccgagtttggcgacggcctgctttatcgtcgtatcatggacctgatctgggaaacgctgacggttaaagatgcgaaggtgaatttcgacagccagctggagaagctggaagaggcgatcccggcggcagatgatttcgacatgtacggtgtctatccggccatagacgcttgcgtggcgttgagtgaactgattcattctcgtctgagcggcgaaacgctcgagcacgcgatcgaggtgagcaagacctccatcaccaccgtggcgatgctggaaatgacccaggaaggtcgcgaaatgaccgacgaagagttgaaagcgaatccggcggtagagcaggaatgggatattcagtgggaaattttccgcctgctggccgactgtgaagagcgtgatcttgagctgataaaaggcctgcgcgcggacctgcgcgaggctggcgagagcaatattggtataaattttcagcagtgagaccagaaaacgtgatttaccgcctgaattgtagcgtctgaaggcttccattccgccccccgtctggtctacatttggagggcgaaaaaaagtggctatcggtgcgtgtatgcaggagggtgcttttttggcatttccgtcgcactcgatgcttagcaagcgataaacacattgtaaggataacttatgaacaagactcaactgattgatgtaattgcggacaaagctgacctgtccaaagcacaggctaaagctgccctggaatctaccctggctgcaattactgagtctctgaaagaaggtgatgctgttcaactggttggtttcggtaccttcaaagtgaaccaccgcgctgagcgtactggccgcaacccgcagaccggtaaagagatcaaaatcgctgcagctaacgtgccggcatttgtttctggcaaagcactgaaagacgcagttaagtaagaccgcgtggcagtgaacagttttatcgaaggggctattaagccccttttgtctgtctggcgccggcctctggcgctggcgggcatcctgttgctgactgcctgcagccacgacacgtcgctaccgccgtttaccgccagcggatatgcggacaatcagggagcgatgcgcatctggcgtaaagattctggcgatgaagtccatcttctcgccgccttcagcccgtggcgtcacggggacacctcgaccagcgaatatcgctggcagggcgatcaactggcgcttatcgaactcaatgtctatggcaaaccgccggaacatattcgcgcccgtttcgacgcgcagggcgatctgagctttatgcaacgggaagtggacgggcagaagcagcagctctccagcgaccaggtcgcgctatatcgttatcgcgccgagcagatccgccagaccagcgacgccctccgccaggggcgggtcgtcctgcggcaggggcgctggaacgctgccgcgcataccgtgctgacctgcgaagggcagacggttacgcccgacctcgatagccgggccctggcgcacattgaacgccgccagagccacgcttccgccgctgtgagcattgcctggctggaggcgccggaaggctctcaactgctgctggtcgccaatgaaaacttctgcacctggcagccgacggaaaaaagcttctaacctttaccagtggttcatgcccatatgaccgccggcgctaccgcgacagccgccatatcccattcctgcgccgcggggaacgcctgcctcagccagggcgatatcaaacttcacccgctgctgatccagcttctggcgtaagccttccatctcctgagcgacagcttcaatcttcccgctgtccggcttttgcgccgtgagcagcgcattgtactcatagcgtttggactgcagctgctggcgcagggcgctggtttgcgcatagtaatcgttatgcagcttttgcacggtagcctgctgctcctgggtcagctgactgtagccctggttgcccatcccgttattgttgccccagtggtggttggcccaggccgcgttgctggcgaaggtcagcgcggcaaaggtaacgagggcgagaggtaaggtacggttccgtttcatggcattttctcctgtgtggtttccttcggtattgcatcttccatgccagtctgaaaaagcccgtctgtgtcggcctgccgaagcctttgccgaggagagcgagtaaaaatgacccgttccgccagggtcaggcgagtcatttttactcgcttaagcgcaggcgatatgtttgagagcaggattggccgcgcggaaacatggcatgatttctgctgaaggagcctgcagatattgaaaaagagatgacaaggactcgccgatgaagatcaaatctctctcccgggacgccgccgctggcgcgctgagctggctgctgaccggcacggttgtgctgctggtcatgctgttctccgcgatgatcgtccgcgactacggtcgcgagacgaccgctgcccgacaaaccattgaagagaaagggagcgtgctgatccgcgcgctggagtccggcacgcgcgtcgggatggggatgcgtatgcatcatgcgcagctgcaggccctgctggaagagatggcctggcaaccgggcgtcctgtggttcgcggtgaccgatgaaaacggtaaaattatcgcccatagcgatccgcagcaggtgggtaaaacgctgtatagcccggcgcagatgcgtgcgttagcggttggcgaacaggcccgctggcgccggcttagcgaaccgcggccggcgctggagatctatcgccattttcgcccgcttaatccggcccgcggccaccatatgggaatgatgaaccgcggcaatagcgccctggctcaggccatcgtcccgcaggtgatttttatcgcctttgatagccgcgagctggatgccgcgcaggcccgcgggcagcgaaatatggccatcatgctgggtgccgccgcgctggtgatagcggcgacgatcctcgctcagttctggttccgccgctatcgtcgctcgcggaaacagctgctggaggcgatggcccgcaaggaaaagctggtggcgcttggccatctggcggcgggggtcgcgcacgagatccgcaacccgctctcgtcgattaaagggctggcgaaatattttgccgagcgcacgccgcctggcggcgagtcgcatcagttagcccaggtgatggccaaagaggctgatcgcctgaaccgggtggtcagcgagctgctggagctggtccgtcccgcccatctaaactaccaaacagtcgatatcaacgcgcttatccgccactcattgcagttggtaagccaggatgcgcagagccgcgggatcgcgctgcaatttactccgcgacctgagttaaccacgatcagcgccgaccccgatcgcctgaatcaggtgctgttgaacctgtacctgaatgcaatgcaggcgattggtcgtgacggcgtcattcgcgtaacagcaagcgaagccgatcgtcagcgggtgaaaatcgtcgtcacggatagcggtaaggggatgagcgatgaagagctacaggctatcttcacgccgtatttcaccaccaaggcggacggcaccgggctggggctggccgtagtgcagaatattatcgaacaacatggcgggacgatccgcgccgaaagtcagccgggagctggagcgatatttacgctttggttaccggtggatgctcaacggagggaagatgagcagcgataaagtacagattctggtcgttgatgatgacgtcagccactgcacgatcctgcaggcgctgctgcgcggctggggctatcaggtggggttggctcacaacggcctgcaggcgctggagcagatccatcagcaggtcttcgacctggtgctgtgcgatatccgtatggcggagatggacggtatcgcaacgttaaaagagattaaggcctataacccggcgataccggtgctgatcatgacggcgttttccagcgtcggtacggcggtagaagctattaagtccggggcgctggattatctggttaaaccgctggattttgacaccctgcagcagacgctggttcaggcattggcgcacacccggcagagcgagagcgaccccagcgttgcgacggattcacggtggggcatgattggcgacagcccggcgatgcaggcgcttcttaacgatattacgctggtggccccttcggacgcgacggtgctgatttatggggagtcgggaaccggtaaggagctggtggcgcgcgccatccacgcctgcagcgagcgtcgtgacaagccgttggtcacgctcaactgcgcggcgctgaatgagtcactgctggagtcggaactcttcggccatgaaaaaggggcgtttaccggggcggatcggcgacgggaaggacgctttgtcgaagcggatggcggcacgctgtttcttgatgagataggcgatatctcgccagtgatgcaggtccgcttgctgcgggcgattcaggagcgggaggtgcagcgggtcggcagcaaccagacgcttgccgttgatgtgcggcttatcgccgccacccatcgcaaccttgcggaagaggtgagcgccgggcgctttcgccaggatctctattaccgactcaacgtcgtgaccatcgagataccgccgctgcgccggcgacgggaagatattccgcagctggcgcagcattttctcaaacgctataccgaacgcaatcgtaagacggtaaaggggttcacgccacaggcgatggacctgctgatccactacccctggccgggcaatattcgcgagctggaaaacgcggtggagcgggcggtggtgctactgaccggaaactatatctctgagcgagaactgcccctggcgatcgccggtacgccgctgccatcagtcgggagcgaggaggggggaattcagccgttagtggaagtggagaaagaggtgattctggcggcgctggaaaaaacgggcggcaacaaaaccgaagccgcccgtcagttaggcattacgcgcaaaacgctgctggcgaaacttagccgttagccttttcacgttcgatggcgcgccagccgatatcgctacggctaaaactaccgtcccagcgaatgtcggtcagcagctgataggcgcgctgctgcgcctgcgctacggagtcacccagcgcggtgacgcacagcacgcgcccgccgttggtgaccacgcgctggtcgtcagacagtttggtgccggcgtggaagaccttaccgtctgcgacttcctgctgcggcaggccgtagatctcatcgcccgtattgtagctgcccggatagccgccggcggcaaccaccacgcccagcgacgcgcggtcatcccactcggaggttttctcgtccagcttgcccgcgcaggcggcgaggcacagctcgaccaggtcggacttcatgcgcagcatgatcggttgggtttccgggtcgccaaagcggcagttgaactcaatcaccttcgggttgccctgcttgtcgatcatcagaccggcgtagaggaaaccggtataggtgttgccttcagcggccatgcctttcacggttggccagataatccgctccatggtgcgctggtggacttcgtcagtaaccaccggcgccggggagtacgcccccatcccgccggtgttcgggccggtatcgccgttgccgacgcgcttgtgatcctggctggtggccatcggcaggacgtgctcgccgtcgaccatcacaataaagctagcctcttcgccatcgaggaactcttcaatcacgatgcggtggcctgcgtcgccaaaggcgttgccggccaacatatctttgaccgccgcttcggcttcctcgagggtcatcgccacgataacgcctttacccgccgccagaccgtcggctttgatgacgatcggcgcgcctttctcgcgcagataagccagcgcaggctccacttcggtgaagttctggtattccgccgtcggaatatgatgacgggcgagaaaatctttggtgaaggcttttgagccttccagctgcgcggcgccttcggttggcccgaagatgttcagcccggcggcacggaacgcgtcgaccacgccaatgaccaacggcgcttccgggccaacgatggtcagatcgatgttctcatcctgcgcgaagcgaagcagcgccggaatatcggtgacgccgatggcgacgttttgcagcgacggctccagggcggtaccggcgttgcccggcgcgacgtagacggtatcaaccagcggcgactgagccgctttccaggccagcgcgtgctcgcgcccgccgttaccgattactaatactttcatctgctgctccaggaattaatggcggaagtggcgcatgtcggtgaagatcatggcgatgccgtgttcgtcagcggcggcaatcacttcgtcgtcacggatagagccgcccggctgaataacgcaggtgatgcctaccgcggctgcggcatcgatgccgtcgcggaacgggaagaaagcgtcagaggccatggcggaacctttcacttccagaccttcatcaccggctttaattccggcgattttcgccgagtagacgcggctcatctgaccggcgcctatgccgatggtcatattatctttggcatacacaatggcgttggatttgacgaatttcgccactttccagcagaacagcgcatcgcgcagttcctgctcggttggctgacgtttgctgaccacgcgcagttcacctgcggtgaccatgccgagatcgcggtcctgaaccagcagaccaccgttaacgcgtttgaaatcgaggccggcaacgcgagtatcccactggccgcaggtcagtacgcggacgttctgcttcgcggcggtgattttcagcgcttcttcgctggcggacggcgcgatgatcacttcgacgaactggcgagagatgatcgcctgcgcggtttcagcatccagctcgcggttaaaggcgatgatgccgccgaacgcggaggttgggtcggttttgtaagcgcgatcgtaggcgtcaagaatcgagttgctgacggcaacgccgcacgggttggcgtgcttaacgataacgcaggccggctcgttgaactcttttacacactccagcgccgcatcggtatcggcaatgttgttataggagagcgctttgccctgcagctgagtggcggtcgccacggaggcctcttttacattctcttctatatagaaagccgcctgctggtggctgttttcgccgtagcgcatatcctgcttcttaatgaagttcagattcagggtacgcgggaagcggccagcggcttctttgctttcgccgtgataggccggaaccatgctgccgaagtagttggcgatcatgctgtcgtaagcggcggtgtgttcgaaggctttaatggcgaggtcgaagcgggtgaccagcgtgagagaaccttcgttggcgtccatctcattaataatggcgtcgtagtcgctgctcttaaccacgatggcgacatctttatggttcttcgccgcagagcgcaccatggtcgggccgccgatatcgatgttttccaccgcgtcttccagcgagcacccttcacgagcgacggtctgggcgaacgggtaaaggttcacgacaaccatatcgataggcgcgataccgtgttgctgcatgataccgtcatcctgaccgcgacgaccgaggatgccgccgtgtactttcggatgcagggtcttcacgcgtccatccatcatttccgggaaaccggtgtagtcagagacttcggtaaccggcaggcctttatctgccagcaggcgagcggtgccgccggtggacagcagctcgacaccacgagcggaaagcgcctgcgcgaattcgacgataccggccttgtcagaaacactgagcagagcgcggcggactggacgacgttgttgcatggtattaaatccccaggatttgaacattacagagagcgttaggtgagtttttgcctaaaaactcacctaacgcacccaaccgggcatccgtgtcatagcgcggcattgtaacgaaaacgtttgcgcaacgctcgcgaatttttatgtttctctccaggccggtgattctccttctatatagctggcgatgcacggggctagcggtcatgtttttacgctctcctgtggataattctgtgtgtaacgaggtataaagcggggttttgctggggaatgcagcagtcagtcatttttctgccatttttctattgcggacgctcgagaactccctataatgcgcctccatcgacacggcggatgtgaatcacttcacacaaacagccggttcggttgcagagaaaaatcctgaaaaacgggttgactctgaaagaggaaagcgtaatatacgccacctcgcgacagagcgctaaagcgcgtcgcaactgctctttaacaatttatcagacaatctgtgtgggcactcaaagtgacatggattcttaacgtcctcggacgaaaaatgaataccaagtctcaagagtgaacacgtaattcattacgaagtttaattctttgagcatcaaacttaaattgaagagtttgatcatggctcagattgaacgctggcggcaggcctaacacatgcaagtcgagcggtagcacagagagcttgctctcgggtgacgagcggcggacgggtgagtaatgtctgggaaactgcctgatggagggggataactactggaaacggtagctaataccgcataacgtcgcaagaccaaagtgggggaccttcgggcctcatgccatcagatgtgcccagatgggattagctagtaggtggggtaacggctcacctaggcgacgatccctagctggtctgagaggatgaccagccacactggaactgagacacggtccagactcctacgggaggcagcagtggggaatattgcacaatgggcgcaagcctgatgcagccatgccgcgtgtgtgaagaaggccttcgggttgtaaagcactttcagcggggaggaaggcgttaaggttaataaccttggcgattgacgttacccgcagaagaagcaccggctaactccgtgccagcagccgcggtaatacggagggtgcaagcgttaatcggaattactgggcgtaaagcgcacgcaggcggtctgtcaagtcggatgtgaaatccccgggctcaacctgggaactgcattcgaaactggcaggctagagtcttgtagaggggggtagaattccaggtgtagcggtgaaatgcgtagagatctggaggaataccggtggcgaaggcggccccctggacaaagactgacgctcaggtgcgaaagcgtggggagcaaacaggattagataccctggtagtccacgccgtaaacgatgtcgatttggaggttgtgcccttgaggcgtggcttccggagctaacgcgttaaatcgaccgcctggggagtacggccgcaaggttaaaactcaaatgaattgacgggggcccgcacaagcggtggagcatgtggtttaattcgatgcaacgcgaagaaccttacctggtcttgacatccacagaactttccagagatggattggtgccttcgggaactgtgagacaggtgctgcatggctgtcgtcagctcgtgttgtgaaatgttgggttaagtcccgcaacgagcgcaacccttatcctttgttgccagcggttaggccgggaactcaaaggagactgccagtgataaactggaggaaggtggggatgacgtcaagtcatcatggcccttacgaccagggctacacacgtgctacaatggcatatacaaagagaagcgacctcgcgagagcaagcggacctcataaagtatgtcgtagtccggattggagtctgcaactcgactccatgaagtcggaatcgctagtaatcgtagatcagaatgctacggtgaatacgttcccgggccttgtacacaccgcccgtcacaccatgggagtgggttgcaaaagaagtaggtagcttaaccttcgggagggcgcttaccactttgtgattcatgactggggtgaagtcgtaacaaggtaaccgtaggggaacctgcggttggatcacctccttaccttaaagaacctgcctttgtagtgctcacacagattgtctgatgaacgtaaagaagcaaggcgtcttgcgattgagacttcagtgtccccttcgtctagaggcccaggacaccgccctttcacggcggtaacaggggttcgaatcccctaggggacgccacttgctggttcgtgagtgaaagacgcgtgccgatgtatctcaaaactcatcttcgggtgatgtttgagatatttgctctttaaaaatctggatcaagctgaaaattgaaacgacacacagttaatgtgtgttcgagtctctcaaattttcgcaatcagaagtgaaacatcttcgggttgtgaggttaagcgactaagcgtacacggtggatgccctggcagtcagaggcgatgaaggacgtgctaatctgcgaaaagcgtcggtaaggtgatatgaaccgttatagccggcgatgtccgaatggggaaacccagtgcaattcgttgcactatcgttaactgaatacataggttaacgaggcgaaccgggggaactgaaacatctaagtaccccgaggaaaagaaatcaaccgagattcccccagtagcggcgagcgaacggggagcagcccagagtctgaatcagcttgtgtgttagtggaacggtctggaaagtccgacggtacagggtgatagtcccgtacaccaaaatgcacaggttgtgaactcgaagagtagggcgggacacgtggtatcctgtctgaatatggggggaccatcctccaaggctaaatactcctgactgaccgatagtgaaccagtaccgtgagggaaaggcgaaaagaaccccggcgaggggagtgaaaaagaacctgaaaccgtgtacgtacaagcagtgggagcaccttcgggtgtgactgcgtaccttttgtataatgggtcagcgacttatattctgtagcaaggttaaccgtataggggagccgcagggaaaccgagtcttaactgggcgttaagttgcagggtatagacccgaaacccggtgatctagccatgggcaggttgaaggttgggtaacactaactggaggaccgaaccgactaatgttgaaaaattagcggatgacttgtggctgggggtgaaaggccaatcaaaccgggagatagctggttctccccgaaagctatttaggtagcgcctcgtgaactcatcttcgggggtagagcactgtttcggctagggggtcatcccgacttaccaacccgatgcaaactacgaataccgaagaatgttatcacgggagacacacggcgggtgctaacgtccgtcgtgaagagggaaacaacccagaccgccagctaaggtcccaaagtcatggttaagtgggaaacgatgtgggaaggcacagacagccaggatgttggcttagaagcagccatcatttaaagaaagcgtaatagctcactggtcgagtcggcctgcgcggaagatgtaacggggctaaaccatgcaccgaagctgcggcagcgacactatgtgttgttgggtaggggagcgttctgtaagcctgcgaaggtgacctgtgagggttgctggaggtatcagaagtgcgaatgctgacataagtaacgataaagcgggtgaaaagcccgctcgccggaagaccaagggttcctgtccaacgttaatcggggcagggtgagtcgacccctaaggcgaggccgaaaggcgtagtcgatgggaaacaggttaatattcctgtacttggtgttactgcgaaggggggacggagaaggctatgttagccgggcgacggttgtcccggtttaagcatgtaggctgattgtccaggcaaatccggataatcaaggctgaggtgtgatgacgaggcactacggtgctgaagtaacaaatgccctgcttccaggaaaagcctctaagcatcaggtaacattaaatcgtaccccaaaccgacacaggtggtcaggtagagaataccaaggcgcttgagagaactcgggtgaaggaactaggcaaaatggtgccgtaacttcgggagaaggcacgctggtgtgtaggtgaagcccctgcgggtggagctgagaccagtcgaagataccagctggctgcaactgtttattaaaaacacagcactgtgcaaacacgaaagtggacgtatacggtgtgacgcctgcccggtgccggaaggttaattgatggggttatccgtaaggagaagctcttgatcgaagccccggtaaacggcggccgtaactataacggtcctaaggtagcgaaattccttgtcgggtaagttccgacctgcacgaatggcgtaatgatggccaggctgtctccacccgagactcagtgaaattgaactcgctgtgaagatgcagtgtacccgcggcaagacggaaagaccccgtgaacctttactatagcttgacactgaacattgagccttgatgtgtaggataggtgggaggctttgaagcgtggacgccagtctgcgtggagccaaccttgaaataccaccctttaatgtttgatgttctaacgttggccccttaccggggttgcggacagtgtctggtgggtagtttgactggggcggtctcctcccaaagcgtaacggaggagcacgaaggttagctaatcctggtcggacatcaggaggttagtgcaatggcataagctagcttgactgcgagcgtgacggcgcgagcaggtgcgaaagcaggtcatagtgatccggtggttctgaatggaagggccatcgctcaacggataaaaggtactccggggataacaggctgataccgcccaagagttcatatcgacggcggtgtttggcacctcgatgtcggctcatcacatcctggggctgaagtaggtcccaagggtatggctgttcgccatttaaagtggtacgcgagctgggtttagaacgtcgtgagacagttcggtccctatctgccgtgggcgctggagaattgaggggggctgctcctagtacgagaggaccggagtggacgcatcactggtgttcgggttgtcatgccaatggcactgcccggtagctaaatgcggaagagataagtgctgaaagcatctaagcacgaaacttgccccgagatgagttctccctgagactttaagtctcctgaaggaacgttaaagacgatgacgttgataggccgggtgtgtaagcgcagcgatgcgttgagctaaccggtactaatgaaccgtgaggcttaaccttacaacgccgaagatgttttggcgatttgagagaattttcagcttagattcagagttgagtacgcaataatttgcgcagcagcaaggcgacaagcgacggaaaggaaggagcatactgaagtatgtgactgactttacgagcgcaggcaacgcagctgatgcgataaagaattgcgtactgagcacaaagaatttgcctggcggcactagcgcggtggtcccacctgaccccatgccgaactcagaagtgaaacgccgtagcgccgatggtagtgtggggtctccccatgtgagagtagggaactgccaggcatcaaacaaagcagaaagcccggtcgaaagaccgggctttttgtttttgcgtttaaaaagaaccccatcccgaaaggtgcgggtttttttgctgtgtggggtatatctcccccggtggcgctgcgcttaccggggctacggatcctcggccacctgctggccgaggggacatcaatgccgcaaagttaccgacgtcaatcgtagtctgcttcagcctgctgctcatacatcaaattcaataacggatacggttgccccagatcgtccgtttcagagcgccctgtcaccctaaaacccatcttctgataaaacccgaccgcttgttcattctgctcatttacattggtcgtcagcttcggcgttaacgacagcgcatgctcaatcagcaacttccccacgccacagccgcggacatccggatcgacgaacagcgcatccatatgatctccggtcagcagcataaaggcgatcggctggtcttccgtactaaccgccacccacagcggagcctccggtaaaaatgcgcgtaccatctcctccagctcctttcgatacgcttttgtcagaaaatcatgcgtggcgtcgaccgaccgacaccagatcgcagtcagtttatccccttcatcaggccgggaacggcggatgttaataaccatactttctccttttctacattcttatattctaactcaacaagcgccgtgaaattttctcaccgtgtacatgcagactcgacattcacccgattcctggttatcttcagctatctggatgtctaaacgtttatacgtatgctatgaggtaatacagttatgccaattcgggtgcaggacgagctgccagccgtcaatttcttgcgcaatgaaaacgtcttcgtaatgacgacaacacgtgcaacgactcaggaaatccgccccctgaaggtgttaatcctcaacctgatgccgaagaaaatcgagacggaaaaccagttcctgcgtctgctatcaaactctccgctgcaggtggatatccagttattacgtatcgatgcgcgcgagtcgcgtaatacccctgcggagcatctgaataacttttactgtaatttcgatgagatctgcgatcagaactttgacggcctgattgttaccggcgctcctttaggcctggttgagtttaacgatgttgcttactggccgcagatcaaacaggtgctggagtgggccaaggatcacgtcacttcgacgctgttcgtctgttgggcggttcaggccgcgctgaacattctgtacggcattcccaagcagacccgcgccgaaaagatttccggcgtctatgaacaccatattcttcatccgcacgccttactgacccgcggtttcgacgactctttcctggccccgcactcacgctatgctgattttccggccggacttattcgcgactataccgatctcgagatcctcgcggagacggaagagggcgatgcgtatttgttcgccagcaaagataagcgcatcgcctttgtcaccggccacccggagtacgatgccaataccctggcaagcgaatatttccgcgatgtggaagccggtttgaaccctgagatacctcataactatttcccacaaaacgacccgcagaacaaaccgcgcgccacctggcgcagccacggcaatctgctgttcgctaactggcttaactattacgtctaccagattacgccatacgatctgcgtcatatgaatccgacgctggaataatactctacgtgagacgatcctaaagcgtttcagcattttgcctctggcaccttcgggtgccttttttatttccgaaattcacttcatacgcgaggataactttaatttcattgttatcaatgtgttaatgataaattaaaattaaaatggaaattgtttttgattttgtaaattaattgagtagtcttaattgtgctgagcgaaaactgcacaacgatctttcgctcgcttccagcggatcaaccaagaggagcagcacaatgacgcagcaggcgacaatcaccgatgaactggcctttagtcagccctatggcgagcaggagaagcagatcttaacgcctgaggcggtagaatttctgacggaactggtgagccgctttacgccggcgcgcaataagctgctggccgctcgtttgcagcaacagcaggctattgacgacgggcagcttccggattttatttcggaaactgcttccattagaaatggcgactggactattcgcggtatcccggctgatttgcaggatcgccgcgtggaaatcaccggccccgtcgagcgcaaaatggtcattaacgcgctgaatgccaacgtcaaagtctttatggcggactttgaggattcgctggcgcctgactggcgcaaagtcattgatggtcaaatcaacctgcgcgatgccgtgaacgggaccatcagctacaccaacgaggccggcaaaatctatcagttgcagcccaatcccgctgtgctggtatgccgtgtgcgcggcctgcatctgccggaaaagcatgtgacctggcgtcatgaggccatccccggcagcctgttcgattttgcgctctatttctttcataactaccaggcgctgctggcgaaaggaagtggtccctacttctatctgccaaaaacacaggcctggcaggaggcggcatggtggaacgatgtcttcagttttacggaagatcgctttgacctgccgcggggcaccatcaaggccacgctgctgattgagacgctgccagcggtgttccagatggatgagatcctgcatgcgctgcgcgaccatattgttggcctgaactgcggccgctgggattacatcttcagctatatcaagacgctgaaaaaccatccggatcgcgtactgccggaccggcaggtggtgacgatggataaacccttcctcagcgcctactcacgcttgttgattaagacctgccacaaacgcggcgcgtttgcgatgggcggtatggcggcgtttatcccgagcaaagataccgaacgtaaccgccaggtgctgagtaaagtcaccgccgataaagagctggaggccaacaacggtcacgatgggacctggatcgcccacccgggcctggcggataccgccatggcggtgtttgaccgcgtgctgggcgataagccgaatcagctctcggtcacccggagcgaggatgcgccaattaccgctgaacaactgctggctccctgcgagggcgaacgcacggaagccggaatgcgcgccaacattcgcgtggcggtgcagtacatcgaagcgtggatctccggcaacggctgcgtaccgatttatggcctgatggaagacgccgcaacggccgagatctcgcgcacctctatctggcagtggatccatcatcagaaaaccctgaacgacggtaccccggtcactaaggcgctgttccgccagtggctggcggaagagctgatggtgattcaggaggagctgggagagcaccgcttcagccacggccgctttgacgatgcggcgcgactgatggagcagatcaccacctccgacgagctaattgattttctgacattgccgggctaccgcctgctggcctaatcgccagatggtgtggttcgccatttagtccttcacctatgagcctggggagccaggaaattatatggagcatctgcacatgaaaacccgtacccaacaaatcgaagaattaaacaaagaatggacgaacccgcgctgggaaggcattacccgtccctacagcgcggaagaagtggtgaagttacgcggctcggtgaatccggaatgcacgctggcgcagcttggcgcggcgaaactgtggcgtctgctgcacggggaggcgaaaaaagggtacgtcaacagtctcggcgcgctgaccggcggccaggccttgcagcaggcgaaggcgggtatcgaagccatttatctctccggctggcaggtggcggcggatgctaacctggcgtccagcatgtatccggatcaatcgctgtatccggccaactcggtaccggcggtggtggatcggatcaacaacaccttccgccgcgccgatcagatccagtggtcagcgggaattgaaccgaacgatccgcgctttatcgactacttcctgccgatcgtggcggatgcggaggccggttttggcggcgtcctgaacgcctttgagctgatgaaatcgatgattgaagccggtgcagcggctgttcacttcgaagatcagctggcatcggtgaagaagtgcggccatatgggcggtaaagtgctggttccgactcaggaggcgattcagaagctggtggcggcgcgtctggcggccgacgtgatgggggtcccgacgctggtcatcgcccgtaccgatgccgacgccgcggatttaattacctcagactgcgatccgtacgatcgtgagtttattaccggggatcgcaccagcgaagggttcttccgcacacacgccgggatcgagcaggcgatcagccgcgggctggcctacgcgccgtatgcggatctggtgtggtgtgaaacgtcgaaaccggatctcgagcaggcgcgccgctttgccgaggctatccatgcgcgtttcccgggcaaactgctggcctataactgctcgccgtcgtttaactggaagaaaaatctcgatgataaaaccatcgccagcttccagcagcagttgtcggtcatgggatacaaataccagtttattaccctcgcggggatccacagcatgtggttcaacatgttcgacctcgcccatgcctacgctcagggtgaggggatgcgccactatgttgagaaagtgcagcagccggaattcgccgccgggccggaaggctacaccttcgtctcgcatcagcaggaggtgggcaccggctacttcgacaaggtcaccaccattatccagggcggtacctcgtcggtaacggcgctgaccggctcgaccgaagaagatcagttttaagccatgcccggtggcgcgacgctgaccgggcctgcaagaggacgcaggccggataagcgagcgcgccatccggcatgacgtggagccggatgggggagagcgatgacgcgtggtctggaattactgattgcccaaacgatattgcagggatttgacgcgcagtatgggcgttttcttgaagtcacttccggcgcgcagcagcgctttgaacaggctgactggcacgccgtgcagcaggcgatgaagcagcggatccatctctacgatcaccacgtgggcctggtagtagagcagctgcgctgcatcaccgaagggaaaagcactgacgtcgattttcttctgcgggtgaaacagcagtacacccaacttttaccggattaccctcgctttgaaattgctgagagctttttcaattcggtctattgccgcctgtttgaccaccgctcgctgacccccgagcggctctttattttcagctcgcagcccgagcgaccctttcgtaccctcccgcgaccgctggcgaaagatttctttccggaacgcggttggtcgcacctgctgggtaaagtactgtccgatctgccgctgcggctaccgtggcaaaacaaagcgcgggatatcggctatatcattgccagtctgcaggaggcgctgggggaggaactgctcgccacctgtcatctgcaggtcgccaatgagctgttctaccgcaataaagccgcctggctggtgggcaaactggtcatgccgatggcgacgctgccttttttgctgccgatccaccgcagcgaagagggtgagctgtttgttgacacctgcctcacaacccatgccgaagcgagtatcgtttttggcttcgcgcgttcctattttatggtttatgcgccgttgcccggcgccctggtggaatggctgcgcgagatcttgccgggtaaaacgacggccgagttgtacatggcgattggctgtcagaagcatgccaaaaccgaaagctatcgcgaatatctacactacattactcgctgcgatgagcagtttattgaagcgccgggtattcgcgggatggtgatgctggtgtttaccctgccgggctttgaccgggtgtttaaggtgatcaaggaccgcttcgcgccgcagaaagagatgaccgccgcccatgtgcgggcttgctatcagctggtaaaggagcatgaccgcgtcgggcggatggcggacacccaggagtttgaaaatttcgtgctggataaacggcaaatcgcgccggcgctgctggcgctgctgcaggcggaagcggggaacaaactcaccgatctcggcgaccgcatcgtcatcagccatctctatattgaacggcgaatggtgccgctcaacctgtggctggagcaggttaacggccaggcattgcgtgatgcggtagaagagtatggcaatgctatccgccagctggccgccgccaacatctttcccggcgatatgttatttaaaaacttcggcgtcacccgccatggccgggtggtgttctacgactatgatgaaatctgctatatgacggaagtgaattttcgcgagatcccgccgccgcgctatccggaggatgagctggccagcgagccgtggtacagcgtttcgcctggcgatgtgtttccggaggagttccgccactggctgtgcgccgacccgcgcattgggccactgtttgaagagatgcatgccgacctgctgcgcgccgactactggcgcgcactgcagatgcggattaaaaacggccatgtggaagatgtctacgcctaccggcgcaagcagcgttttagcgtgcgctatggcgccgacagtagaccggataaggcgtttacgccgccatccggcaaggtgcgccgatctgcctgatggcgctacgcttatcaggcctacttaaaatgcccctctggggcatttttttatttaaccccgccatacgccagcgtcacttccttcgccgccttgatcaccagcgcgcccagctcagtcacccgatcatcggtcatacgcgagatagggcctgagatggagattgccgcgaacggttcgcgatgttcatcgtaaatgcaggcggcgacgcagcgcaggccgagcgcgtgctcctcatcatcgaaagagtagccccgcttgcgggtctgggctaaatcttccttcagatgcagcggggagaccagcgtggcatgcgtataggcatgcagccctttacggtgcagcagactggtgacctgctcttcgctcagctgcgcgagaaacgccttcccggcgccggaagcgtgcatcggcagtttaccgccgattggcgccgacatccgcatcagctgggtgcactgcacctgatcgataatgatcgcctggtggtcgctctggtcgagcaccgccagattcaccgtttcaccggaatcttccatcagctggcgcaggatcgggtggacaatggccagcagattgcggctttgtagaaagctgctgccgaccacgaaagcatgcgcccctacggcccagtgacccagctcgccaacctggcggacgaagcccagctgttgcatggtggtcagcagacggtgagtcgtggagttgggcagacccgcctgctgcgccagttcggtcagcgcgacgctgctgtgggactcggcaatccattcgagtaatttcaggccgcgggtcagcgactgaacctgaccgccagcctgctgggcagtggcagccgcgggttttctgccgcgtttcgcgggaatgggggttgtggccatcgcgaactcctttttctgtatcgtggaaataattttcgttttatttggcaataatgcaatcacaaccggactcatcggaggagtgaagctgaacatgtctcatattgcccgttgttgtcttttccgctccggtggtttatgccagtatggtttgttggctatttggcctgagtcgagcgttgtcgggagcaagtgtgagcagcaaagttgagcaactgcatcagcagttaaaagaacgtattctggttctggatgggggcatgggcaccatgatccagggctatcgtctgagtgagcaggactttcgcggtgagcgctttgctgactggccgtgcgacctgaaaggcaacaacgacctgctggtgctcagcaaacccgaagtgatccgcgagatccacgacgcctatttcgaggccggcgcggatatcattgagaccaacacctttaactcgacgaccatcgcgatggcggattaccagatggaatccctgtcggccgagatcaactttgccgcggcgaagctggcccgcgccagcgccgacgcctggacggcccgcacgccggaaaaaccgcgctatgtcgcgggcgtgcttggcccgaccaaccgcaccgcctctatctcgcctgatgtgaacgatccggcgttccgtaatattacctttgaccagctggtggccgcctatcgcgaatccacccgggcgctggcggaaggcggcgtggatctgatcctgattgaaacggtgtttgacaccctgaacgctaaagcggccatctatgcggtgaaagaggagctggaggcgttaggcgttgacctgccgctgatgatctccgggaccattaccgatgcctctggccgcacgctttccggacagaccaccgaagccttttataactcgctgcgtcacgccgaagccttatcgtttggtctgaactgcgccctcgggccggacgagctgcggcagtacgtccaggagctgtcgcgcattgccgaatgctacgtcaccgcgcacccgaacgccggcctgcccaacgccttcggcgaatacgatctggacgccgacaccatggcgacgcaaattcgcgaatgggcggaagccggtttcctcaatatcgttggcggctgctgcggtaccaccccggagcatatcgccgccatgagccgggcggtagcgggcctgccgccgcgtcagttgccggaaattgcggtggcctgccgcctcgccggcctggagccgttgaatatcggcgacgatagcctgttcgttaacgtcggtgaacgaactaacgtcaccggctcggcgaaatttaagcggctgattaaagaagagaagtacagcgaagcgctggacgttgcgcgtcagcaggtggaaagcggcgcgcagattatcgatatcaacatggacgaggggatgctcgacgcggaagcggcgatggtgcgtttccttaacctgattgccggcgagccggacattgcccgcgtgccgatcatgattgactcctccaagtgggaagtcattgaaaagggcctgaaatgtattcagggcaaaggcatcgttaactcgatttcgatgaaagagggcgtcgaatcctttatccaccatgcgaaactggttcgccgctacggcgccgcggtggtggtgatggccttcgacgaggttggtcaggccgacacccgcgaacgtaaaattgagatttgccgtcgcgcctacaaaatcctcaccgaagaggtcggcttcccgccggaagatattatcttcgaccccaatatctttgccgtcgccaccggtatcgaagagcataacaactacgcacaggactttatcggcgcctgcgaagacatcaaacgcgagctgccgcatgcgctaatctccggcggggtctccaacgtctccttctccttccgcggtaatgacccggtacgtgaggcgatccacgccgtattcctctactacgcgatccgcaacggcatggacatggggatcgtcaacgccggtcagctggccatctatgatgacctcccgggcgagctgcgcgacgcggtcgaagacgtgatcctcaaccgccgcgatgacagtaccgaacggttacttgagctggcggaaaaatatcgcggcagcaaagcggacgacggcgcgaatgcccagcaggcggagtggcgcacctgggaagtgaaaaaacgcctcgaatattcgctggttaagggcattaccgaatttatcgaacaggacaccgaagaagcgcgtcagcaggccgcccgcccgattgaggtcattgaagggccgctgatggacggcatgaacgtggtcggcgatctgttcggcgaaggcaaaatgttcctgccgcaggtggtgaaatccgcccgtgtaatgaaacaggcggtggcctaccttgagccgtttattgaagccagtaaagagcagggctccagtaacggcaaaatggtgattgccacggtaaaaggcgacgttcatgacattggcaaaaacatcgtcggcgtggtgctgcagtgcaataactacgaaatcattgatcttggcgtgatggtcccggcggataaaattctcaaaacggccaaagaggtaaacgcggatctaattggtctttccgggctgattaccccatcgctggacgagatggttaatgtggcgaaagagatggagcgccagggctttaccatcccgctgctgataggcggcgcgaccacctcgaaagcgcatacggcggtgaaaatcgagcagaactacagcggccccaccgtttacgtacagaacgcctcgcgcaccgtcggcgtggtgtctgcgctgctctcggacacgcagcgcgacgagtttgtcgcccgcacgcgcaaagagtatgaaacggtgcgtatccagcatgggcgtaaaaaaccgcgtacgccgccggtgacccttgccgccgcgcgggaaaacgatctggcctttgactgggagagctacacgccgccggtggctcatcgtctgggagtacagacggtggaagccagtatcgagactctgcgcaactacatcgactggacgccgttcttcatgacctggtcgctggcgggtaaatatccgcgcattctggaagatgaagtggtaggggaagaggcgcagcgcctgttcaaagacgctaacgagctgctggataagcttagcgcagagaaaaccctgaacccgcgcggcgtggtgggtctgttcccggccaaccgcgtgggcgacgatattgaaatctatcgcgatgaaacccgcacccacgtgctgacggtgagccatcatctgcgccagcagacggagaaggttggcttcgccaactactgtctcgccgattttgtcgcgccgaagctgagcggcaaggcggactacatcggcgccttcgccgtgaccggcggcctggaagaggacgcgctggcggacgcctatgaagcgcagcatgatgactataacaagatcatgattaaagccatcgccgatcgcctggcggaggcctttgccgagtatctgcatgagaaagtgcgcaaggtttactggggatatgcggccaatgagaacctcagcaatgaggagcttattcgcgagaactaccaggggatccgaccggcgccgggatatccggcctgtccggagcacaccgaaaaggggaccatctggcagctactggacgtcgaagcccataccggcatgaagctcaccgagtctttcgccatgtggccaggcgcatcggtttccggctggtacttcagccatccggacagtaagtacttcgccgtggcgcagatccagcgcgatcaggtcgaagattacgcgctgcgtaaaggaatgacgccggcggaggtcgagcgctggttagcgcctaatctgggctatgatgcggactagtcgtcatctttccttacaacaaacaaggcgctctgtgagcgccttgtctctttattgaggttaaccccttatactgagataggttcctgaacttcggaaaacctataacgataaggagaagctgattccgtgttaactctgctacacctgttgtccgcggttgctctgctggtgtggggcacgcatatcgtgcgtaccggggtgatgcgcgtctatggcgctcgcctgcgtaccgttctcagtagcagcgtagagaaaaagccgctcgccttctgcgcgggtcttggcgtgactgcgctggtgcaaagcagtaacgccaccaccatgctggtgacctcatttgtcgcccaggatttagtgggtctgatgccagcgctggtgatggtgctgggggccgacgtcgggacggcgctgatggcgagggtgttgaccttcgacctgtcgtggctgtcgccgttgttgatatttatcggggtgattttcttcctcggccgcaagcagacccgcgccgggcagcttggacgggtggggattggtctggggctgatcctgttggccctcgagctgattgtccaggccgtacaccccataacccaggcgaacggcgtgcaggtgattttcgcctcgctgaccggcgatatcatgctggatgctttgattggcgccgtatttgcaatcattagctactccagcctggcggcggtgctgttaacggcgacgctgaccgcggcgggagcgatctctttcccggtggcgctgtgtctggtgattggcgccaacctgggatcggggctgctggcgatgcttaacaacagcgcggcgaacgcggcggcgcgccgggtggcgctgggcagcctgctgtttaagctggtggggagcctgattattctgccgttcgtccatccgctggccgcggcgatgcacaagctgccgttggccgagtccgagctggttatctacttccacgtcttttacaacctgctgcgctgcatcgcgatggtgccctttgccggaccgatggcgaagctgtgccagcgtctgatccgcgatgagcccgagctggataaccatctcaaacccaagcatctcgacccgtcggcgctggacaccccggcgctggcgctggccaatgccgcgcgtgagacgctgcgcattggtgacgcgatggagcagatgctggagagcctgcacaaggtgatgcatggcgaaccgcgtcaggagaaagagctgcgccgtatggcggatgatatcaacgtactttacaccgctattaagctctatctggcgcgaatgccaaaggatgagctggcggaagaggaatcccggcgctgggcggaaattattgagatgtcgttaaacctcgaacaggcgtccgatatcgtcgagcgaatgggcagcgagatcgccgataaatcgctggcggcgcggcgcgccttctcggtagaagggttaaaggagcttgatgcgctgtacgatctgctgctcagcaacctgcagctggcgatgtcggtcttcttctccagcgatgtgcccagcgcccgccgcctgcggcgcagcaaacaccggttccgcattcttaaccgccgctactcgcatgcgcacgttgaccgtctgcatcagcagaacgtgcagagcatcgaaaccagtacgttgcacctggcgctgctgggggatatgaagcgtctgaacagcctgttctgctcggtggcttacagcgtgatggagcagccggatgaagacgacgaacgggatgactactgagacggattatttttccgtttatgtcgcttcttttctggcgaggtagccctcccgggacgtggctgacgccttcccgggagggacatcctagcttctggcaaacgccgaggcctctgccaccagcgcgctatccggccgtacgccggtataaagggtaaactgctcgacggcttgcagggcaataacttccgcaccgctgatggtttgcttaccccgttgttgcgccaggcggatcagcggagtttccgccggcaacgcgaccacgtcaaacacgacgctggcctgggccaccatggcctcgctgaacgccagcgtgttgctttccgctccccccgccatgcccagcggtgtgacattgaccagaatctcggctgcgatcccttcgggcaggggctgccactgaaagccatactgttttgccagcgccaggccgcgctggcgattgcgggccgcaatgatcacgtcgcggaaaccggcatcacggaaggcggcaatgacggctttccccatgccgccgctaccctgaatcatcactctggcgttggtatcgagccgatggctggcgatcaggcttttgaccgcgatgtaatcggtgtttagcccggttaacttcccgtcgtcgttgacgatggtgttgacggagtcgatgacttttgctgacggatcgatcgcgtcaagaaacggtatgcagctctctttaaacggcatggagaccgcacagccgcggatacccaatgcgcgaaccccttttaccgccgcctcaatatccttagtcgtaaaggctttgtagaggtagttcaatcccagcttgtcatacagatagttatgaaagcgggtgccgaagttgccggggcgacccgccagggagatgcacagcagcgtatcgcggttaatcatgcgtaatatcctccgcgtgggccagcagatacgcttcagcatcctgggaccagatcccatggtgacgcgccacaatcgctgccagttcgggatcggcgatctcgcccagcggcgtgagcgggaaggcttttccggtatacaccagcttttttcccccgccgacggcaggcagatcgagggtggtttcgcccgcggcgttcaggccgagaatatgggtgaccactttcgccgtctggacctttttcgcctgcatcagcgccaccgcggcgcgcatatcgtcagtattaccgccggaggtgccgacgtagtgggtaaaggcgtagtgcacgtcgtagaagttgatcggggcgctgaattgcttatcctgggggccagcaaagaaattcaggcagccgtccggagccagcaacgaggaggccagggtgatcagctgttcgtttggcacaaacacgaagatatcgtcgaagccatggccgccgctgagcgccagcagcgtatcgcgactggcctcatggccgtcgaggtagtggatcagcgtctgcggctcagaggggtaatgacggcgggcgtagctgagcttcggcttattggtatcggtcactaccagtagtgaaggattgatggggccgtgcagcgcatagtcgatagccagcagccccatcggccccgtcccgcccaggatcagagtgtgtccctgaggacggatccccatcacgtggttgtaactcccctcctgcagatgataattggcgttgaaagcgccaatgacgcaggagagcggctccaccagcgatccttcaaaccaggtatccccctcccaggtgagcaggcaatcctgcgccatcacctcattggggatcaccacatgggtggcttcgccaccgatccatgggaatgagtagccggggcagtcgggtcggtcgggcaactgcaggttggcctggatcacgtagcgctgccctggctgaaacttatgctgccactttttaccgacggcaaggatttcgccgcagaattcatgaccgataataatgggcctggtggccacatcatctggcacctttttatgatcggcaccctgattggcctctttccatgaggaaagacacaggctgtccgtgaccacccgggcgaggatctcatcgtcctgcatcgccgggagggtaaaggtttccaggcgcaggtctcgtttgccatacaggcgcagggccgttgttgtttgcataaaccacctcatccccttcatctttcggggctatgttgttgacgtcaccccggcatcgccggggcggaataatcaggacagaaagccgagggcgttgccgataatgcctaagccgaaaagggcgaaaatcagccagaccggattcactttcttgttcagcagacgcaccatcagtagcgtcaggcccagcgccagcaggccggggcagagctgatcgaggatgttctggacggtcatcgtgacggtggcgccgtctgcaccgggcgtttgggaaaccaccagcggcacattgatggtggtccatttggtcaccagcacccccatgacaaacaggccgagaatggaggcgccttcggtcagcttctgcagcaggttaccgcccatatcgctgacgatattgacccctttacggaagcccagttgcaggccgtaccacttcattgccagccgcactgcattgaaaataaagaaaaataacaaaggtcccagaatgttgccggagagggccagtgaggcgccaagggccgcggtaatcggccgcagcgtgccccagaccagcgggtcgccgacgccggccagcgggcccatcagacccactttgatgccgttgatagcgccatcgtcaatggccgcgccgttagcccgggcctcctccatggcggcggtgacgccgatcaccgggccacacaccgccggcgtggtattaaagaacaccagatgacgcttcagcgccgcgacctgatcggctttgagcggatacaggcgtttgatcgccgggatcatgtcgtagcaaaaccccaggccatgaatacgttcgaagttaaaggaggcctgctggaggttggagcggagaaacatgctcaccaggtcgccttgcgtgatttttttctgttccattttcggctccattagtcgtcaagctggtcaagggcgggggcagagggggcagtggaggcggcgggttcagccttacgccactgtggattgagctggatgtagatcagcgcgatgatgacgcccacgccgccgaaggccagcaggctgaagtcgagataacccccggcgagaaaaccgaggaaaaagaagggcatcaggtatttcacgcccatcattcgcagcaccatcgcgtagcccacgacgacaatgaaaccaccggcaatctgcaggccgcgggtgacgaattccgggatcgcgctgagcatactgctgaccatatccgcgctaacgaacagcgagaccaccagcgccgggattgccacgcgcagtgcctgcacccccagtgcggagacatgcagcaggtcgatggtgcgaaagcgcgcctcctcggccgctttgtccgcggcgtgctggaacaccacggtaatggtacgggcgaaaacggtcagcacctgcccggcggcggccaccggcagagcaatggcgataccggtggcaatgctctggtggcccacaatcaccagaatggcggagataatgctggccagcgccgaatctggcgactgcgctgcccccacgttcatccagccgagggcgatcagctccagcgtaccgccgagcataaccccggtttttaaatcgcccaggatgaggccaatcacggtacaggcgataaggggccgatgggtctgaaattcatccagcacgctgcccattccggcaatacaggaaaaaataaatatggctattatctgtagggtactaatttccataatttatgacctttaaggtgtgagtcatcctgcctgctacggcatatcacaacaggcgctattttttattcgcagaaagctgtttcgttaattttgtcgagaatattgactgacggatctgatgcgaccacgcgtaaatcgagttttacgcccagtttatcgagttcacggaatgcctgaatatcctgcggatccaaagaaacggctttggttagctgttttttaccgggtcgccaggccatgccaccaatatttaacgtggcgatctgcacgccctggcgcaccatcgttaaaacatcgtgtggattggtaaataaataaaagacggtctcgtcctgatattgcgggttatgatagaccgcaaccgctttttccagactgacaacgtttaccttcatgcctggcggagccgcctggcgcaacagggtccggcgaacctcatcgttaaatacatcgtcattgcagataattatccgctgggcgttggcgacttttgaccacacggtggtgacctggccatgaatcagtcggtcatcaatacgggcgagggtaatttgcatcagaactcctcctcaacggtttctggctgctgccagaccacacagcactgactggcgatggcctgcagatgctggcataagtcatcggcgctcagggtatgctggttatccaccagctcgagcgccagcggcagcgacaggccgctaatcacccggatctgcgggtgacgcattgccagcccggctgcggcattccatgggcttccgcactgcaaatctaccgcgattacccactcctcatcggtgtgggcgcttactaacttttccaggttaatggcgatattcgccgcgttttcgccggggacaaacgcgacggcgctgacgttaacctcgccgtagaccatgcgtaccgaatcgagcatggccccggccagctggccgtgagcgcagaagatagcgtgaaccatacttcctccttaaccgcgcgttttaccgccggcaatgttagtggtgactccggtgatgtagctggcgcgcgctgacaagagatagcaaacaaaatcagccacttccgagagctttcctgcccgcccgatgggaatggcgtttttggtatatccctcgcgaagttgctcgacggtgatattgcgcgtccaggccagcgcctcttcatattccggtgtccgcagaccggttttttcgaggatccccggcgcaacgccgaccacgcggatcccatatttacccaattctttggaccaggagcgggtaaagctgttgagcgcggccttggtcgcggcgtagcagctttgaccttcagagccttccaggccgctctccgaagagacattgacaatcacaccggcgcgctgtttgaccatttgacgcgccaccgcctgcgacatgaaaaacacccctttctggttgatattgaccattttttcaaaagcggcttcgtttaattcatagcggccggccggtgctttttcgtcgactaataaacgcgggaaattcacgccagcgttattgaccaaaccatcaatacgcgaccagcgctgaataatggcatcgatagtctgttgcacctctgtcgcgctggaaatatccgtcggccagaagtgataattatcgccattgtgatgacgatcgccgccatgaatatcaatcatctggacatgagcaccttgtgataataattcatcgacaatggccagcccaattcccgaggcgccgccggtcacgataatgacgttatcttttaaatttaaccaggtattcattattcactcccatttctttagataaagggatcccccgcagcgggtgctgcgtgaaatcatatcctgtgtgttatttcagtaataactcagccgtttctctgtttgtcaccagacaattaatatagcgtccgtgcaatgcgccaagaatgccagagtatttctcttcccccatggcgatgccgatggaatagcgagcctggcgcagcttcgccatttcgatcgacagggttttttcgctcatattggtatcgactaacccgccgttaatatcgtagaaacgcgaacagatatccccggcgacgtggcgggcgttgagatcgtcgctctcttcgctgccgtagaaggcgtgccagtttgcgccgtcgcgaatggccggtgaaccaatacccaccagcgccacatccaggctgtcccagtaggatgagatggttttaaagtgctgggactgcatgatgccgttgcggatcagcgggttatccagcagggctggaaaatcggcaaggtgggattccgctttcagtctggctgccgcgccgtaggttaaggtgttcacatggtagcggctctccagtttaccggaaggtccaccgatgatggggacgcagatcacctggcgtgactggctggcctgcggcaggttctccaccagcgaacgcacggcgcggccccatgaaaaaccgatgatatcgcctggctccagcaaccgatcgacaagcagggcgccatgctggcccatcgcactcagctgttcttcttccagcagcccatcgctgctggcaaccaccgcctctttcaggccaaatttttgcttgagctgttgctcgagccacaggttttcattgtagtcatagttgatggcgatggtaacaatgccctgctcgcggccgcgcttcagcaggcgactgatggtggtgcgatagatccccagctcgcgagcaatttgcgcctgagtcatatcctgctcgtaatagagctgggcgattttgacaatcaaccggatatcgtcactgttttccatggtcatctgcaggctcctgcacatttgtgcaaatcgcgggtttgtgctgttgatctgatataaccctattagagccaccgtttaaagcgattttcttttatttcatcaccctaatctggcgaataatcttgcacatttgcgttatcaatagcgggttgttggcacctttgtgcattgcacgctaaatcgctgattctgtgatatttcatcatgcaaagttgccaggcgttgagcgggacacttttgtgaaaaaaggcgtagtcgatcacaccttgcgccggagggcgcaaaggcacatcttttttctcgcccacaaggtagggtatatttcgcttttacaggagaatctatgctgcccgactcatcaacccgattaaataaatacatcagcgaaagcggcatctgctcgcgtcgcgaagcggaccgctttattgaacaaggcaacgtctttatcaatggcaagcgcgccactattggcgatcaggtgaagcctggcgatttagtcaaagtgaacggacggttgattgagccgcgcgaagcggatgatctggtactgattgcgctgaataagccggtcggcattgtgagcaccaccgaagatggcgagcgcgacaacattgtcgatttcgtcaaccacagcaagcgtatctttcctatcggccgtctggataaagactcccaggggctgatcttcctcaccaaccatggcgatctggtgaacaagatcctgcgcgccggcaacgaccatgaaaaagagtatctggtcacggtcgataagccggtgaccgatgagttcattcgcggcatgggcgcgggggtaccgattctcgggaccgtgaccaaaaaatgtaaggtaaagaaagaagcgccgttcgttttccgcatcactctggtgcaggggctgaatcgccagatccgtcgtatgtgcgagcactttggctatgaagtgacgaagcttgagcgtacgcggatcatgaacgtgagcctgacggggatccccttgggtgaatggcgtgatctaaccgatgacgagctgatcgacctgttcaagctgattgaaaactcctcttccgaagcgaagccgaaagccaggccgaaggccaaagcggcgactcccggcatcaagcgcccggtggtgaagatggaaaatagcaacgataagggccgcccggctggtaacgggaaacgtttcacccagccgggacgtaaaaagaaaggacgttaacgcctgccgcgggtcggcgtattcgccgaccaggaaaaggtcgcttccttatccgttttataagcctgctgttttctcacctggcgggctttcttcgcttccgcttcacgctgcgccatcagcttatcgatatattcctttttcacgctgttcgtttccgcattgctcagcgggcggccatgcgcaatacgcgcgcggtcaagcagcgttttcaattcgcgctgttcgcgctcggtcatctctttttgtgtaatacgggggagtgccatggtggtgccctcagtcagaccagagcacccagtgtacggcaatgaatattttactgatagcctgtatggcaactaaagcaggcacacgcccgggcctgcgcccggacgtatcaaactcagcgcttgtcggcttttttggcgatgggctttcctgaccagtacccggccagcagcgaaccggacaggttatgccagacggagaacagcgcgcccggcagcgccgccagcgggccgaagtaaattttacccagcgcggccgccaggccggagttctgcatccccacctcgatcgccagcgtacggcaggtggattcatcaaaaccaaacagacgtccgccccagtacccgccaagcagaccaatagtgttatgcaggatcaccgcgataatcaccaccaggccgacggaggcgatatgggcggcggaacccgccaccaccgcgctgatgatcgccagaatgcacaccatcgagaaggcgggcaggaacggctctaccgctttcaccaccttcggcagcagatgatggacaatcagtcccagcgcgataggaatgaccacaatctgcagaatgctgagcaacatgcccatgacgtcgacctgaatatgcgcgtcgacgtacagacgggtgagcagcggtgtcgccacgacgccgacgagggtggagaccgaggagatggtcaccgacagcgccacatcccctttggcaagaaagatcatcacgttggaggcggtcccgctggcgacgctgccgaccagcaccatcccggcggaaagctccggcggcatatgaaacagcagcgccagcagccaggcggcgagcggcatcaccagataatggagaaagatccccgcagcgaccggcgccgggcgcgacaggacgcgtttgaaatcctccagcttcagatgcacgcccataccgaacatgatcagcatcagcagggtggtgacccatgggccaattggggtgaaggtggtgggagtgtaataggccagaacggagagcagcagtgcccataacgggaacagccgcgtcagagttgcgagcatgttgtgttccttgcgatacgcgaaccgggccgcgccatcccgatgggcggcgagcaggtcagctggttgtgttgatgttgttataaaaaagccgggttcgagcccggctataggtattgtttatcgtgctaaggaattttattcaaacaaattatgatgcagcttctgcacaaccttctccgcatcgtcgcccggcaccaggaagcacaggttgtggctggaggcgccatagcagatcatgcggatgttaaacggctcgaggacgccaaagacctctttgccgacgccgcaggctttcgacagctcattgccaatcagggcgaccagcgccagattttcttccacttccacgcggcacagcgaagagagctcggtcagcagcgcctgggtcagcagggtatcgcccgcagaggtcgagccggtggtgtccatggtcagggccacgctcacttcggaggtggtgatcaaatcaactgagatgttatggcgcgccagaataccgaacacttcggcgaggaagccgcgggagtgcagcatattcaggctgtgcagcgtcagcagcgtttgccggcgacgcagcgccagcgcgcggaacagcggcgggttctcggtggttttacacaccagcgtaccgcccgctttaggctctttactggagccgacaaacaccgggatatcgctgcgcacggcaggcagcagggtcgccggatgcagcactttggcgccaaaggtggccatttccgctgcctcttcaaaggcgatgacgtcgatgcgtttcgccgccggcgcgacgcgcgggtcggtagtatagatccccgggacatcggtccagatatcgacgcgggtggcattcagcgcttcgccaagcagagcggcggtataatcgctgccgccgcggccgagggtggtggtgcggcctttcgcttcgctgccgataaagccctgggtcaccaccaggccttccgccaggcgcggcgccagctgctgctgggtcagttcggcgacggcggcgatgtccggttcggcgcggccaaagcgatcgttagtgcgcagcactttacgggcgtcaaaccactgcgcctgaataccgcgttcacgcagaatttccacaaacagcagggtggacatcagttcgccatggctgaccagttcgtcggtcagggcggttgaggaggcgagcgcggcggcttccgccagcgtcgtgatattttccagcaagcgctcaatctcttcgcggatcacgttgggataacgcaaacgctccagaatattgaactggatctgacgcagagcgtccagctgggaaaaacgttcggtgggttccagccctcccgctaaggccaccagaatgttggtcacgccggcagaggcggagagcacaacaatacgggtattggcatcaagcagcgccacatcgatgctgcggttcattgcgtcaaaatcagcaacgctggtgccgccaaatttggcgacgactagatctgtcataacaacctcgtgtcagggggcctgacttattaaaacgattcctgagcaccgatcctggcaggggctggacgccgccggatcgcaacaaaatgtcttaataagccaggccaaattattcagccatggcacaagggaagagcgataaacagggtggcgcagagtgataaacaactacgatgtcacccagaagtgctccaccttgtagacccgactcaccgctttgggcgctgaggtgttcgggtatgaaacgcccgactgcgaacgtttctggtgacaacccaggggattcagcccctgtggccggcgaggagcgtgaccagacgctctttcacctcggcgttgctccccctcacgtatcttccccggactggttcctccaatacggttacctgggcaacgcacctcttctggcaattactgacgtctttcacctggccgggggaacagggacattatatcccccgcgaataccctttcgctgtagcgtgaaatgcgcgagcaatagatacctaccaatacgtaagcactgcggatatataaaggcttaacgccagctatgtcaacgctgcggttatgcggatttttcatgcctctgcggctaacagaaaaaagccttatgatagctatactaatggggctttttactccgttttgacccgattcctgaccggcgtcagggtcaagtcacaaaaatcatcacaattttccgtcaccggcgctacaatcgaccgaagtcacaatctcaaatcagaagagtattgctaatgaaaaacatcaacccaacgcagacctctgcctggcaggcattacagaaacacttcgacgaaatgaaagatgtcactatcagcgagcttttcgccaaagatagcgaccgtttttctaaattttccgcgacgttcgacgatctgatgctggtggacttctccaaaaaccgcatcactgaagagacgctggctaaactgcaggatctggcgaaagagactgacctggcgggcgctatcaagtcgatgttctcaggtgagaagatcaaccgcaccgaagaccgcgcggtactgcacgtcgcgctgcgtaaccgcagcaatacgccgattgtggttgatggcaaagatgtgatgccggaagtgaacgctgtgctggagaagatgaaaaccttctccgaagcgattatctccggtagctggaaaggctacaccggcaaaccgatcaccgacgtggttaacatcggtatcggcggctccgacctcggtcctttcatggtgaccgaggcgctgcgtccgtataaaaaccacctcaacatgcactttgtctctaacgtcgatggcacccatatcgccgaagtgctgaagaacgtgaatccggaaacgactctgttcctggtggcgtccaagactttcactacccaggaaaccatgaccaacgcccacagcgcgcgcgactggttcctggcaaccgcgggcgacgacaagcacgtggcgaaacacttcgccgcgctttccaccaacgcgaaagcggttggcgagttcggcatcgacaccgccaacatgttcgaattctgggactgggttggcggccgttactccctgtggtcggcgattggtctgtccatcattctctccgtgggcttcgacaacttcgttgagctgctgtccggcgcgcatgcgatggataagcacttctccaccactccggcggagaaaaacctgccggtgctgctggcgctgatcggcatctggtacaacaacttcttcggtgcggaaaccgaagcgattctgccgtacgaccagtacatgcaccgctttgccgcttacttccagcagggcaacatggagtccaacggtaagtatgttgaccgtaacggccacgcggtagactaccagactggcccaatcatctggggtgagccgggcaccaacggtcagcacgcgttctaccagctgatccaccagggcaccaaaatggtaccgtgcgatttcatcgctccggctatcacccacaacccgctgtctgaccaccatcagaaactgctgtctaacttcttcgcccagaccgaggccctggcctttggtaaatcccgcgaagtggttgagcaggaatatcgcgatcagggtaaagacccggcgaccctggagcacgtggtgccgttcaaagtgttcgaaggtaaccgcccgactaactccatcctgctgcgtgagatcaccccgttcagcctcggggcgctgattgccctgtacgagcacaaaatcttcacccagggcgcgatcctcaacatcttcacctttgaccagtggggcgttgagctgggcaaacagctggctaaccgcatcctgccggagctgaaagacggcagcgaagttagcagccacgacagctctactaacggcctgattaaccgttataaagcctggcgcgcataacgcttgcgcagctaagacggaatgccgaccctttggtcggcattttttatttatagccgccgcagcagcctcgctggattccccgcccacacgcctttctcggtaatggacttcgttaccacgctgcccgcgcctatcaccaccccatcgcagatgctgacggccagaatcgtggcgccgctgccgatcgacacgtcatcgccaatctcgatccgcccccagctggcgcggtcggcgtttggtttaccctcgcgaaacaggtcgttggcaaacatcacgccgtgaccgataaagcagcgctggccgatggtgacgtactcgcagataaaggtatgggattgaattttactgttcgcgccgatgcgggtattcccctggatctcaacgaacggcccgacgaagacgttatcgccgagctggcaatcatagaggttggcgggctggtaaataacgacattttccccacaaacgacgttacgtacgccggtatcacgaagctcaggcatagttcctctcaaatcggtttggccagaatatgtaaggtgctttgctggctggcggagtggaaagtcgtgtctctgatgtgctgcatcccctggcgttcgtaaaaacggcgcgcggcgggattcgcggcgagtacttccagccacagccaactttcaccggccgtttttgctcgcgtctcgacggcgtgaaaaatatgctcgccgtagcggtggccagtcttccccggcatcaggtagagcttatgcagcagcgtaccaatcttgccgtcgtcagccattcgctgctgatagctatatttagcgaaaccaacaggagagggggcttcggcgatgagccagtgttgggtcgcatccgcaagactccgacgtagcgcatcttcggcatattcttgcttaagaaataacgccagttcatcggcatcgcgccagagatgagcaaagtggtgatgatagctggcatagcccatcgcgctaagctggggcgcgtcctcgggacatgcctgtcgaatagttaacatgctgcgttcctcgcgtcgttctgcggctatattgcctgtaaagtgaacaatgtggaacgacaaaaatcggtgggagaaggctggaggcgctccctccagcctgggggttagcgggcgaaagcgatcgcttcgatttcgacgccggcatctttcggtaaccttgctacctccacacaggagcgcgccggaaaggccgcctggtgttcgataaagaaggcctcgtaggcggcattgatggcggcaaaatccgccaggtctttgacaaacaccgtagttttaacgatctgcccgaccgtgagtccggcagcttcaacgatggctttcacgttctccagtgattgccgcgcctgttcggcaatgtcctcgggcatggtgccgtccagcggattaatcggcagctgaccggaggtgatggtcatcgcgccgagattgacgccctgcacgtacgggccgatagcggcaggcgcgtcagcggtggtaataatcatacggtttatccttcaaacggttacataaaataatttaacaacaccagcgagccgacgccgctcactaccacccacaccagacctaaacggaagctggcgagcgtgcagatgatggcggcgatcaccttcggattttttaagtcgaactccatgctggaattcacgctcaggatctgaatggtgatgatggccggcagaacggtgaccggcacgaagcgtagcgttttggtcacccgctcggacatctggatcttgccggccaggccgataaacgagaaacggatgagaaaagtcaccgcggccatgcccagcgtcagggcgataaaatagctattactcattttccatcgcctccactaacggcatatcggattcggtttttgccatctgcttgcgctcttccgccaggtcgacgcacaggccggcgaggacgccaagcactgaggcgacaacgatacccagcgaatagggtaggaccactaacagcacgccggaaacggcggctacaaccgcggcgacggtgcaggcctggcttttaatttgcggcaccacgatggcgataaaggcggcgaccatggcgaaatcgagaccgtatttctcaatgtggggaaacgaggcgccgaccagcgcgccaagaaaatcagccagcacccaaatcgcccagaaggtaatcatcgccgaaccataaaacagatatttttcctttttatttccttccatctctttgacggtggtggcatacacctcgtcggtgagcgcataggacataaagcattttttaaagaatgaagcttcgcgcacggtgccggaaatagaggcgctatacagcacgtggcgaagattgataattaatgtggtgaaaataatcacgccgagcgtggcgccggtttttaacatattcagtgccagcatttgcgccgagccggcaatgacgatcgccgaccacgccgtactctgccagacgctcatgcccgcgctaacgcttaatgcgccgacaataaatgaaaatggaaagtcgccgatgcataggggcataatagcgctggcgccgcggaagatgacttttttattcatctgctatacctgctaatttataaataatagtgtgggtagagtacgttaatcggggcctgctctttcaggcccgtgaaatggtattatttagcgaccataatgctgataatttctttatcggtgagagtcattggtttaatcaccagacggcataagttattaatggtttgctcaacatcagcgcagacaataccgtcattggcgccagcacagctattttgcatggccattagtaccgccttaaaggcgctggataccactgacgagactttcatcgcgcagctgttggaagcgccatcacaaatcatgccggtaatatcgctgatcatattaataatcgcggtattaatcgtgttgatgtcgcgggtaaacagccaggccataccggcggcggcgcccatagcggcggttgaggctgcgcatagcgcagataagcgcgtgtaacgagaatgaattgagatggcggtgagatgagagagagacaaagcgcgagccagggtctcttcatcgacgccgagatgctctgcaaccaccactaccggcatggttgctgtaatgccctgattgcctgagccgaagttagacatcgctaccaccggcgcgccgcccatgcgggcatctgaagcggcgacggtgttgatgatcaccttgcttaacagatcgttgctcatcaggccgtttttcactgcgtcagaaaaggtaccgttaatgttcaggccatatttttttgttttgccttctgccgccagcgcggagtttaagcgcgcggcgtcgagaataaagcgaatatcattaaagtcgacgcgattaataaagtcgtaagcctgttgtagcgagaaagtgggcagcgtttcgcgctgggtgcgcgtattctgtttttcgcttaatggctgcggctggccattaatataaagttcgaccacgttggtgtgggttcctttgaccacgacacgacagcaattatcgccagcagagagggttagatcgagatgaataaaatcaggagtctcttcgacggcaatatcaacggcgttattggcgatcagcttctgcgccatttcaacgtgttgcggagtgatatcttccagcgtttttaatcccttttgcgggtcgccgccaaatgcgccaattgcggctgccagcggtacaccgcaaacggtggtgccgggtatggtgacgcccatcgcgtttttataaagattggcggaaataaaaccgctaattttagtgcaaggctgatccagatattgtgcggcgtaggcggccgcgaaggaaatagcgacgggttcagtacaacctaaagccggggcgacctcttgtttgagccattttacgtacagggaagcgttatcggtgttcataatgatttaatgtccaaaattaaattttattcagctgcgataatgctaagacaaaagataagaaaaaacttaccctaataaccataaaaagactgtggtttggagaaaaattttatcttatgggaggttttaagatacacctgtttcaaaaagtaaactttttatatttcagttagttgggttgattcgttctaagcgtaacggatgattttgttaatctgctcacagcgttgctggaaggacaattttctcttgttcgtacttttcgaatcaatagcccggagatagcgtaagacgaaggaatcataggtagatctggatcacacttttgcgctatacagatcgacaacgttcatgcatttgaggtgtcactatgccgtcggtatatcgtccgctggttaatttcgttgcgaaggccatgcaggccgtgctgaatctggcactgctgtgcctgggaattattctggtggtgttcctgggaaaggagaccctgcatctggcgcacgtactgtttacgccggagccggtgagtaagtacaagctggtcgaagggctggtggtctattttctctactttgagtttatcgcgctgattgttaaatattttgaatccggttttcactttccactgcgctatttcgtctatatcggtattaccgcaattgtgcggcttattatcgtcgatcatgagtcgccgctggcggtgctcatttactccgcggcgatcctgatcctggtgattacgctctggctgtgtaactccaatcgcctgaaacgcgaataaaaaaaagcggcctccagggccgctgaccaacagtcacaaatagaatttatgtagggtccagttgaggatagcagtggcattgaccttactttttcagctgagggcgacggcgacaatacccggttggggtcgtgtattgcggctagaccgtcggccctcctctgaaatttggggccggtgttacaaaaaaattaacctttcactccacccgccgtcaggccattaaccagccagcgctgcgccagcaggaagacaaccgtgatcggaatggcggagagcaccgccgcggcggcaaagtcgccccacagatagttctgcgggttgagatactgttgcatacctaccgccagggtatagctgttcacatcgcgcagcagcagcgaggcgaccggcacttcggtgatggccgcgatgaacgacagaataaacacgactgccagaatcggcaccgacagcggcagcagcacgaggcggaaagcctgccatggggtcgcgccatccagcgccgccgcttcttccagcgagccatcgatggtttcgaagtagcctttaatcgtccagacgtgcagcgcgataccgcccatgtaggcaaagatgacgccgccgtgggtgttgaggccgacgaacgggatgtactggcccaggcggtcaaacaacgcgtacagggcaaccagcgacagcaccgccgggaacatctggaaaatcagcatccctttcagcagggtcgctttccccgggaagcgcatacgggcgaaagcgtaggcgcaggtggtggagagagcgacgataccgatcgcggtgatcccggcgaccttaatcgagttccacagccacagcaggaccgggaacggcggcggcgtgacgcggccatcggcgtgttcgacgctgaagcctaacgccagacgccagtgttcccaggagatggtatccgggatcaggctgccggtggcgaagttgccttcgcgcagcgagatagcgataaccatcagcagcggaaacataatcgcggcgataaaaatcagtagcaggagatgcgtggtaaataaacgtagcttctgcgatttgggttggaccatagccattgtcgttatctcccttaatcaaacttcatgcgcgtggctttcagattcacaatcgctaacgcgccaaccagcaggaagataagcgttgcgatagccgccgccaggccgaagtcctgaccgccgccgccttcaaaggcgatgcgataggtgtagctcaccagcaggtcggtataaccggccggggtggtggtgccgagacggtccggaccgccgttggtcaacaattgaatcaggacgaagttgttaaagttaaaggcgaagctggcgatcatcagcggcgttagcggcttaatcagcagcgggaaggtaattttaaagaagttctggaacgggccggcgccatccattgccgacgcttcgtacagatcgtccggaatcgccttcagcagccccatgcacaggatcatcatgtacgggtagcccagccaggtgttgacgatgatgatcatggtgcgcgcggtggtcgggtcgctaaaccaggccggcttaatgccgaacagcgtgctgagcatcatgttgatttcaccaaagctctggttgaacagccctttgaaaatcagaatcgaaataaacgacggtacggcgtacggcagaatcagcaggacgcgataaatcgctttgcctttcagcgcttcccactgcaccaagcaggcgaggatcatccccaccgcgacggtcagcaccacggtcagcaccgagaacaccaccgtccagacgaagatcgcgaagaacggtttctgaatgccttcatcgtggaagacgcgggtaaagttgtcccagccgatagtcacagtgtagcccgggctcagcttctcattgccccagctgccgtcggcgttaattgactggtagaagccgacgtcgttgttcgggcggtatttaacgtgggtctgattgttggtcagtaccccgtcttcgccgagggtatacagaggctgggtaccggagaactggcgcagggagctcatgatgactttgctgtcatccggcagcacagcggtcagctggttcagcgcggtgcgattctgggtaatcacgcgcaggttggcgcgctcgccttccggcagggcgtcggtttcttttaacgccagcttctgctcgccgccaaatttaaaggcgtcagaaaggtagtttttaccgctttcgccgtcggtcagcgccagcttccactcgtcacccgcagggatcagcgtgaaattataggctttgccggcctggaaggaacgatccatcagcacctgctgcgcacgctcaaaggtcagctggttggtgctgctgtagttggtaaacgcgatagcgatagtgcagatcagcggaaacaggacaaacaggcccatgccggcgaggccgggataaacatagcgccaggcataagccttgcgattagcgaaaatatacaggccaactgagcttaaaatcagcgtcatgatggcgaacaggtactccccctgggcgtacatcaaaacaacaaggtaacccaccagcaggcacagtaagccaatcacagaccatgtgagttgcgggctttgccaccagtgtctctttttaacggcatccatggggatcatcctctacagcggtgaaaacttatttgtcaggtggcgcttcgcttacctgacctacggtccgagccgtagtggtagggcgggtaggcgcacgcgccacccgccgttttcttacttagtgatacggctctgtgcatctttcagcgcagcatcgacagtctggcgaccgctggcggcgttgataaccgcggtacgaacggcataccagaaggcagacatctgcgggatgttaggcatgatttcgcctttctgggcgttcgccatggtggcagcgatgcgcggatctttttccagtttttcctggaaggatttcagcgccacggcacccagcggtttgtcgttgttaacggcttccagaccctgatcggtcatcaggtagttttcgaggaactctttggccagctctttgttcgggctggcggcgttgatccccgcgctcagcacgccaacgaacggtttcgatggtttgcctttaaaggttggcagcagggtcacgccgtagttaaccttgctcttatcgatgttagaccacgcccacggaccgttgatggtcatcgcggtttcgcctttgttgaaggccgcttccgcgatggagtaatcggtatcggcattcatgtgcttgttcttgatcaggtcaaccaggaaggtcaggcccgctttcgcgcctgcgctgtccacgccgacgtctttcacatcgtacttgccgttttcaaacttgaacgcgtatccgccgtcggcagcgatcagcggccaggtgaagtacggttcctgcaggttgaacatcagcgcgctcttacctttcgctttcagttctttatccagcgccgggatctcttcccaggtcttcggcgggttcggcaccaggtctttgttgtaaatcagggacagggcttcgaccgcgatcgggtaggcgatcagtttgccgttatagcgaaccgcatcccaggtgaacggatagagtttgtcctggaacgctttgtccggggtgatttccgccagcaggcccgactgcgcgtagccgccgaaacggtcatgcgcccagaagatgatgtccgggccgtcgccggtcgccgcaacctgcgggaatttctcttccagcttgtccgggtgttctacggaaactttaatgccggtgtctttttcaaactttttacccacttcagcgaggccgttgtagcctttgtcgccgttaatccagataaccagcttaccttcttcaatttttgcgagggcagaggcggaaaacatcatcgtggtcagtgccgacagcgcgaggatgcgagcgccagttttgattttcatatacccgtcctttttggtgttgtactcgtggatacacttcggtggcttaacgatgatgagtttccttttttaacaacccctttccatcctccccaggtctacgccccacccgctggttgtgtgatctccattgcaaaaacggccgtattgcgtcctggagcacagaaaaaagcgcccaattttgtcgcctccatcacgaaatcacgctccgcccgccatcccccgcggcgagagccaatctctcatcctcccatctcctcccccataaaaaagccggggggtggaggatttgcctgcgtaatgaatgccgcatagtcgacccatcttgaatgtgactgttagtgacaggttgtaacgaagggagaagggcatggcgagcgtacagctgcgaaatgtaacgaaagcctggggtgacgtggtggtatcgaaagatatcaatctcgatatccacgaaggggaattcgtcgtgtttgtcgggccatcgggctgcggcaaatctaccctgctgcgtatgattgccgggttagaaactattaccagcggggacctgtttatcggtgacacccgcatgaacgagatcccaccggcagaacgcggcgttgggatggtattccagtcttatgcactctatccccacctttccgttgcggaaaatatgtcgtttggcctgaagctggccggcgcgaaaaaagatctgattaaccagcgggtgactcaggttgcggaagtgctgcagctggcccatctgctggagcgtaaaccgaaagccctctccggcggtcagcgccagcgcgtggcgattggtcgtacgctggtggcagagccaagcgttttcctgctggatgagccgctttccaacctcgatgccgccctgcgcgtccagatgcgtatcgaaatctcccgtctgcataagcgactgggccgcaccatgatctatgtcacccacgatcaggtggaagcgatgaccctcgccgacaagatcgtggtcctcgacgccggccgtgtggcgcaggttgggaaaccgctggagctctatcactatccggctgaccgcttcgttgccggcttcattggttcaccgaagatgaacttcctgccggtcaaagtcaccgcgacggctatcgatcaggtgcaggttgaactgccgaaccgtcagcaaatctggttaccggtggacagcgccaacgtgcaggcgggcgccaatatgtccttaggtattcgaccggagcatttactgcccagcgatatcgccgatgtaacccttgaaggcgaggtccaggtcgtcgaacagctcggtcacgaaacgcaaattcatatccagatccccgccatccgtcagaacctggtttaccgccagaacgacgtggtgttggtagaagagggagccacattcgctatcggtttgccgccagaacgttgccatttattccgtgaggatggcaccgcttgtcgtcggctgcataaagagccgggcgtgtaaggcttcccattaaaaaagcgcgaacccggctggcgatataccggcgaagcgtgcaaagaaaagcaatgatctcaggagatagaatgatgattactctgcgcaaacttcctctggcggtcgccgtcgcagcaggcgtgatgtctgctcaggcgctggctgtcgatttccatggctacgcgcgttccggcattggctggaccggcagcggcggcgagcaacagtgcttcaaagcgaccggcgctcaaagtaaataccgtcttggtaacgaatgtgaaacctatgcggaactgaagctgggccaggagctgtggaaggaaggggataagagtttttatttcgatactaacgttgcctattccgtgaatcaggaagatgactgggaaagcacctctccggcgttccgtgaagccaacatccagggtaaaaacctgatcgactggctgccgggctccacgctgtgggcgggtaaacgcttctatcagcgtcatgacgttcacatgatcgacttctactactgggatatctccggcccgggtgcaggtctggaaaacgttgaccttggcttcggtaagctctctctggccgctacccgtaactcagaaagcggcggctcttatactttctccagcgatgacaccaaaaaatatgctgcgaaaactgccaacgacgtctttgatatccgtctggcgggtctggaaaccaacccgggcggcgtgctggagttaggggtcgattacggccgtgctaacccgcaggatgactatcgcctggaagacggcgcgtcgaaagacggctggatgtggaccggtgaacatactcagtctatctggggcggcttcaacaagtttgtggttcagtacgccactgacgcaatgacctcctggaacagcggccactctcaggggaccagcatcgataacaacggcagcatgatccgcgttctggatcacggcgcgatggacttcaacgatgactggggcctgatgtacgtggcaatgtaccaggacgtggatctggacagcaagaacggttctacctggtacaccgtgggtgtccgtccgatgtacaaatggacgccgatcatgagcacccagctggaaatcggttacgacaacgtgaaatcccagcgtaccagcgaaaacaacaaccagtacaaaattactctggctcaacagtggcaggcaggcaacagcgtctggtctcgtccggctatccgtatcttcgcaacctacgcgaagtgggatgaaaactggggctacagcaacacctccggtctgcagacgaaagacagcagcggaagcggcgctttcacctccagccgcggtgacgacagcgaagttaccttcggtgcccagatggaagtgtggtggtaataccgtccgcaggacgggtgtaacctgggaggggcgtcagcccctcctgattattcagggttagcgcgctattgcctggctaccgctaaaccgatgctatccaaggtgagaagaatgaaaatgaagaaaactctcgtcgctctgtgtttatccgcagggatgttggcatgcgtgccggggatgagccttgccgatgttaactttgtaccgcagaacaccagcgccgcgccggctattccagccagcgcgctgcagcagctgatctggacgcctgccgatcaatcaaagacgcagagcgttgatttaaccaccggcggtcaacgcctggatgtcccggggatcgtcggaccggtcgccgcctggagcgtgccggccaatatcggtgagctgaccctgacgctcgacagcgaactgaacaaacataaacagatttttgcgccgaacgtgctgattctcgaccagaacatgacgcccgcggcgttcttccccagcaattactttacctatcagcagccgggcgtgatgaccgctgaccgcctgggcggcgtgatgcgcctgaccccggcgctgggccagcaaaagctctatgtgctggtgtttaccactgaaaaagatctccagcagaccacgaccctgctggatccggcgaaagcctatgccaaaggcgccggcaatgcggccccggatatcccggatccgatcgctaaacataccaccgatggcgtgctgaagctgaaagtgaaaactaatagcacttccagcgtgctggtagggccgctgttcggctcctccggcccgggtccggtaaccgtcggcaacaccgcggcgccggtagccgcgccagccgccgccgcggcgccggccgccaaaagcgaaccgatgctcagcgataccgaaacctacttcaacaatggtattaagcaggcggtgaaacaaggtgacatcgacaaagccctgaaattgatgaacgaagctgagcgcctcggctcgaaatccgctcgttccacctttatcagcagtgtaaaaggcaaggggtaatcgtctccccacaatgctgatgtttaggcacagcctttaggtgcatcctccgggatgcacctttttttgcacgcgcggcagcctgttgcatggctgttgcgtgaatgatcgtatattgacgtttgcccgccaccaaccgcctattctgcgatacaatgctttcacgttatgtaccggagaatcaggcatgtcccatcctgcgcttacgcgactgcgtgcgctgcgctattttgccgttatgccatccctgccgccgccgctaagtgactggctgctgctggaggactcaatgacccagcgctttgaacaacaaggaaagcaggtcaccgtgaccctggttaacgaagggtatatcggccgtgacgcgctgactgacgaagcggcgctgctgcccgacgagccgcgctactggctgcgggagattatactcaatgccgatggcgagccctggctggccgggcgcacggtggcgccggagtcgacgctgtgtggtccggagctggcgctacagcagctcgggcaaactccgctgggccgatacctgtttacgtcgtcgacattaacccgcgattttattgaaattggtcgcgatgcagcgctgtgggggcgtcgttcccgcctgcggctgagcggcaaacccctgctgctgaccgagctttttttgcctgcgtcgccgttgtactaagaggaagaaaaaatggagtggagtctgtcgcagaataagctgttggcgtttcatcgcctgatgcgcactgacaaaccgatcggcgctttgctgctgctgtggccgacgctgtgggcgctatgggtggcctcgccgggcgtcccgccgctgtggatcctggcggtattcgtcgccggcgtctggctgatgcgcgccgccggctgcgtggtgaatgactatgccgaccgaaaatttgatggtcacgtaaagcgtaccgcccgccgtccgctgccgagcggcgatgttaccgagaaagaggcgcgaacgctgtttatcgtgctggtgctgctctctttcctgttggtgctcaccctcaacaccatgaccattctgctgtcggtggcggcgctggcgctggcgtgggtctatccgtttatgaagcgctacactcatctgccgcaggtggtgctgggtgcggcctttggctggtcgatcccgatggccttctcggccgtcagcgaatcgctgccgctgagctgctggctgatgttcctcgccaatattctgtgggcggtggcctacgatacccagtatgcgatggtggatcgcgatgacgacgttaagatcggcatcaagtcgacggcgatcctgtttggcgaaaacgatcgtctgattatcggtatcctgcaggtggccgtactggcgctgatgggcgcggtgggttggctgaatgggctgggctgggaatattactggtcgctgttcgtggcggcgggtctgtttggctggcagcagaagcttatcttcaatcgcgaccgcgataactgcttcaaagcgtttatgaacaataactacgtcgggctggtgctgttcctcggcctggcgatgagctacctgtaacctcctgtccgctgccccccggcattccggggggcagcaaacgccgcgttacgcgtcgtcctgcgtgacgctctcaatggtcagtcggacatccgacgtaatcaagtccgccagcatccgataaaccttcagggtctcttccggctcggcgtcgccggtgtcgctgatatagccttcatcgcgcagggtcaacaccagggtgctgaacaccgctttgtcgaagaactccggtgcattgatgccgtgtagcaccgacagacgctgggccacggtgcgactctctttttccagcgagctgcggttgatcgccgggttagcgctcagcagccagaaggtgatggcatagcgctgcagcgtctcgcgggcgccagcggccagcagctgcagggagcgagagtgcgacgggttgaggctcatgacatcgccatcgacgacgatcagctcctgacgcagcatctcggcaatcagcgcatccaccactccggccagctccgctttttcccagcgcaggaacagctcggccttgaggaacggatagagtgtttccacatgacgcagcacttcggcgcggctgagatgacgatgctgagtcaccagagcggctaacagcgacggcatcaccagcatatgggcgatattgttgcgatagtaggtcatcagcaccgcctgctcgcgcggcaggatgatgatgtcgccaatggtgtccttctccacttcgaacttgttcatctgcagcgcatgatcgatgagctcgctggccgaagcggatggggcggtcgcatccggagaatagggcacattgcgcagcagcgcgaggtagcactctaactgctgggtgagctgctcacgggtcagcgaacgctggcgggaggccagtagcgccgtacagcacaggttcatggcgttggccgcgccggcgttattgatgcgcaccatcaggtcagcggcgatgctattcaccgtcggcgtcagccaggaggggcgaaccgcttcgatcgggtcgatcgcttcccgccaatccggcacatgctggttaagataggtcatcagcggcagcggttcgccgaagttaacgtaaccctggcccaggttgcgcagcttgcttaaaccgcgcaccatctgcggcagactctctttctctttagtggcgccgcgcagctctttggcgtaggttcctacctccatcacgtgctcatagccgatgtaaatcggcaccagggtgatcggtcgggttccgccgcgcagcatcgcctggatggtcatcgacagcgtaccggtcttcggatcgagcaggcggccggtacgggagcggccgccttcgacgaaatactccacggaatagccgcggctgaacagttcgccaaggtattcgcggaacacggtggaatagagcttgttgcccttaaaggtgcggcgaataaagaaagcgccgaggcggcggaagatcggtccggccggccagaagttgaggttgatgcccgccgcgatatgcggagggaccagcccctgatggtacaggacgtaggagagcagcagatagtccatgtggctgcggtggcaggggacatagacaatttcatggccgtcgtgcgccagctggcgtacgcgctcggcgttatgcacgttgatgccctggtacaggcggttccaggtgaagccgagaatgcggtcggtcaggcggatcatctcgtatgagaagttcgccgcaatctcttccatcagcgcgatagcgttctgctgtgccttctcgtgcgaaattttcttgctgcgcgcttcgtcttccaccgcgcgggcaatcgctttcgaggccagcagtttattaaacagatcctggcgggccggtagacgcgggccgacggcggccagccgctggcgggcaaaatgcatgcgagcgacgcgagccagcttctgggcgatgatcttatcggtaccgtgctcatccgccatgcggcgcagcgaaacggacggcgagaagcgcacgaaactgtcgcggccgagccaggagacggcgaaaaatttctgaatgccgttcagcatccgcagcggcggattgacttctcctttctcgcgacccggcgaacggccgaacatgaccgaaaccggcaccatttgcacatcgaggtccggatggttgcggtgcagatcgaggtaatcgtggaacagcttgatggactcttcttttggcgtgtaataagtaaatacgcgcggcccaccgtggatgaatacgtaacgcggcagcagggcgccgtcgatttccagcggttcaagcgggtcaggtaaatcatgcgccaggcattgggcgcgcagcgtcagcaggtccgccttcgaattatagggcaggacgtacatgaccggacgcgaggtatcgagtcctaattcctgggcaggctctgccggaatagacttgctttttaccagcacctgtaatggtaaattcagtaatttatagtaaattcgttgccagccggacataaacgatgtgaagcctctggttaatcatgcaaatgcgcggcaagaataacagaaagtgggcaaaatttccgttaccacgcggcaaacgcgcacactcatcgacgtcatttacgtaaaaaggttttgtgatggccaataataccaccgggttaacccggatcattaaggcggcaggttactcctggaaaggatttcgtgcggcgtggatcaacgaggctgcgtttcgtcaggaaggcgtcgccgctatcgtggccgtcgcggtagcctgctggctggacgtcgacgccatcacccgcgtattgctgattggctcggtcctgctagtgatgatagtcgaaattctcaacagcgcgattgaagcggttgtggaccgtatcggctcggattttcacgagctttcagggcgcgccaaagatatggggtcggcggcggttctgctggcgattatcatcgcgctgatcacctggggaacgctgctgtggagccattatcactaacgttcttcgctaaccctcgcaaaatatgaacaatccgccgatttttgtgtgccatgtggttccaaaatcaccgttagctgtatatactcacagcataactgtatatacacccagggggcggaatgaaagcgttaacgaccaggcagcaagaggtgtttgatctcattagggatcatatcagccagacgggcatgccgccgacgcgtgcggaaattgctcagcgcttggggttccgttccccaaacgcggcggaagaacacctgaaagcgctggcgcgtaaaggcgcgatcgagatcgtctccggcgcttctcgcggtattcgcctgctgacggaagaagagcaaggcctgccgctgatcggccgcgtcgccgccggtgagccgctgctggcgcagcagcatattgaaggccactatcaggtcgacccgtcgatgtttaagcccaacgccgatttcctgctgcgcgtcagtgggatgtcgatgaaagacatcggtattctggatggcgatttgctggcggtccacaaaacccaggatgtgcgtaacggccaggtggttgtcgcgcgtatcgatgaagaagtgacggtgaagcgcctgaaaaagcagggcaatgtcgttgaactgttgccggaaaacagcgagttttccccgatcgtcgtcgatctgcgccagcagagttttaccattgagggtctggccgttggcgtgatccgtaatggagaatggctgtagcgcctgcctctgcgcagcgtcatctgttgcgtgacgctgcgacgtttttcctcaatcaggtcctcaaacatgctgctcaacgctgccgataaagcgctgtggcgtcttgccctccctatgattttctccaacatcaccgtcccgctgctggggctggtggatacggcggtgatcggccacctggacagcccggtatacctcggcggcgtagcggtcggggcgacggccaccagtttcctcttcatgctgctgctgttcctgcgcatgagcaccaccgggctcaccgctcaggcctggggcgccaaagatccgcagcgcctggcgcgggcgctggtgcagccgctggcactggcgctgggcgccggggtgctgattatcctgcttcgcctgccgctaattgacctcgctctgcatattgtcggcggcagcgaggcggtgcttgagcaggcgagacggtttctcgaaattcgctggctcagcgcccccgcctcgctggccaacctggtgctgctcggctggctgctgggcgtccagtacgcccgggcgccggttattctgctggtggtgggtaatctgttgaatattgtgctcgatctgtggctggtgatggacctgcggatgaacgtccagggagcggcgctggccacggttaccgcggagtacgccaccctcattattggcctgctgatggcgaagcgggtgctgacgctgcgcggcgtgtcgctggcgatgctgaaaaacgcctggcgcggggatctgcgccgtttattggcgttgaatcgggacatcatgctgcgctctctgctgctgcagctgtgctttggcgcgctgaccgtattcggcgcccgtctgggcagcgacatcgtggcggtgaacgccgtactgatgaccatgctgacctttaccgcctacgcgctggatggctttgcctatgccgtggaggctcactccggccaggcctacggcgcgcgcgacggtagccagttgctggaggtgtggcgggcggcctgccggcagtccggcatggtggcgctggcgtttgccctgatttacagcctggcggggcagtacattatcgcgttgttaacctcactgccttccctgcagcagctggccgatcgctatctgatctggcagacgatcctgccggtggtcggcgtctggtgttatctgctggacggcatgtttatcggcgcgacgcgcggcgctgagatgaggaacagtatggcggtcgccgcggcggggtttgccgtgacgctgcttacgctaccggtgcttggcaaccatggtctgtggctggcgctggcggtgttcctcgccctgcgcggcctgtcgctggcgctgatctggcgtcgacactggcgaagcggcacatggtttagttagttatctcccgtcattgccgctagccgtgaccttccccggtcgcgctacgcttacagggcgattcaatagcccggctcagcgtggcgcaagccgggaacatcctcttcgcgttatcccgcggtgcgatggttaaaaattccgaataacgaatcgacgccagcattctcatctatagttaataccatgtccggcacaaaacgggctgtaaacccaccgaatgatgaggacgttattatgaataaagacgaaatcggcggtaactggaaacagtttaaaggtaaagccaaggaacagtggggcaaacttaccgatgatgatatgaccgtaatcgaagggaagcgcgaccagctggtcggcaaaattcaggagcgttacggctatgagaaagatcaggctgagaaagaagtctcagactgggagcataagaacgactatcgctggtagcgttccttgatccgaagaatgaagcatttgtgttagtgcctgtctgaatggcgcacggacgcgccgttaaccctttttcccgctgcggcagccgctcagcgggctttctttttgagctgaatagtatgatcgtgctggcagtgtcctggggtgctgcaggcttcgacttccacgcagcccgcgcaaagcccgtgagcttctatcacattgtggcgcagggcaaaccccatgcgggccgccagcgtatgcatgatatcttccaccccttccgccgcttcttcttttaccacgccgcagcggtcgcagataaacatggccgagctatgggtcggctggtcgaacagatggcacagcacatagctattggttgactctaccttatggacaaaaccctgctcgagtaaaaactccagcgcacggtaaaccgtcggcggcttcgcctgcggctctttctcacgtagcaagtccagcagatcgtaggcgctgattgccccttgctgcaggctcatcaggcgcaacacttccagacgctgtggagtcaggcgtacgccgcgctgtgcgcaaagcttttcagcatgcgctaacatctcttgcgaaggggtcttatccatgagcatcctcgggttgcgtgaatttgaatctgttactttatcacgttcctcagaaaacaccgagagccggcaggtgatacgggtcatacttcaggttgtcggcaccggcgcccgtcccgggcgctggccgcttattctcgagcagactacgccttagccgctcgctaaaaccaccatgtccgatttaatcacaacacgcccgaccctgggtatgctatatctgaagtgtctcattttcgggagaaaacgatgaaacgacctgattgcattcgccactggcgcgaactggaagggcccgacgatgctacttatcccgacagcccggagcgtttttcaatcggcgcgccgctggggcgaggtttacgtctcaaccggctggggatccaccacgagcggctgccgcccgggcggcgcacctcttatccacacgcggagagcgatgaggaagagttcatctacgtgctggagggctatccggaagtgtggataaacggctatctctggaagctggagcccggcgacagcgtgggttttcccgctggtaccggcatctgccacacctttctcaataacaccgagcaggaagttcgtctgctggtggtgggcgaggccaacaagaagtacaaccgcatttattacccgctcaatcccggctatgccgcgacgcgccaggatcgttgggttgaccatccgccgcagttcttcggtccacacgacggcaagccgcggaaaaagtaatcatttcaggtgaggggcgaagcgcggcgcactatgcgcctgtggtgtatctttatgctatagtagcgcccctttttacccggatgcttatttattcgccatgatgcctgaatcaacgtcacctgttttccctgctcaccgcttctccatcgcgccgatgctcgactggaccgaccgacactgccgctacttcctgcggctgctgtcgcggcatacgctgctgtataccgaaatggtgaccaccggggcgattattcacggcaaaggggactatctggcctatagcgaagaagagcacccggttgctctgcagctcggcggcagcgatccccaggccctggcgcagtgcgcgaagctggccgaggcgcgcggctatgatgagatcaacctcaacgtcggctgcccctccgaccgcgtgcagaacgggatgtttggcgcttgcctgatgggcaatgcgctactggtggccgactgcatcaaggcgatgcgcgatgtggtgtcgattccggtcacggtgaaaacccgtatcggcattgacgaccaggacagctatgagtttctgtgcgatttcattgagacggtctccggcaagggcgagtgtgagatgtttattattcacgcccgcaaagcctggctctccggcctgagtccaaaagagaaccgcgagatcccgccgctggattacccccgcgtctggcagctgaagcgcgatttcccccaccttacgatggcgatcaacggcggcatcaaatcgctggacgaagccagagtacagcttgagcatatggatggggtgatggtcgggcgtgaggcctatcagaacccgggcattctggcctcggtcgaccgcgaaattttcggcgtcgccggcgcggatgccgatccggtagcggtggtgcgagccatgtacccctatattgagcgcgagctcagcaagggcacctatctgggccatattacccgccatatgctggggctgtttcaggggatccccggcgctcgccagtggcgtcgctacctgagcgaaaatgcgcataaagccggcgccgatattgcagtgctggagcatgcgctgaagctggtggccgataaacgttaatttctgaccaaaacctggtgaaattgaccacgcctcgcgcactgacgcggggcgttttcttttaaagtcaagtgcttatgtttggcatgctttttgtaatacctgcagagtgaagtattcattttttgggagagaaccatgctggaactgctatttgtcattggattttttgtcatgctgctggtcaccggcgtatcgctgctggggattatcgcggcaatcgtggtggcgacggcgctgatgttcgtcggcgggttgttcgccttgatgatcaaattactgccgtggctgctgctggcggtggcggcggtgtgggttattcgggcgctgaaatccccgaacggaaatgcttttcgcgacaataaccgttggcgttactaaggtattgaggggtgcgtcacaacctgaacaattttgcagacaaccgcgtaggcattgctgcgcaaatctgtcactattagcgcgttaacgaattcatcgcgctgtaccctacatacagccgaactaaaaaaaagtaagggcttcccagctggaagccctaaacttttgccccttctgccaacttatggcagcagcaaactcgaaccctgcgtcacccggctctccagaacttcatgcgcccgccgcgcttcgctcagcggatagatctgactttcagccacgtccactttaatcaccccgctggcgatcagcgaaaacagttcactgcaggcttcctccagttcttcccggttggtgatatagccctgcagcgatgggcgagtgacgtacagggagcctttttgattcaggatccccagattaacgccggtcaccggaccggaggagttaccaaagctgaccatcaggccgcggcgctgcagacagtccagagaggcctcccaggtatctttccccaccgagtcgtagacgacggccactttcttaccgtcggtgagcgccttgagccgctccacgatagactcctcgcgatagttaatcacctgccaggcgcccgcctctttggcgcgctgcgctttctgcgcgctgccgacggtaccgataagtttcgcccccagcgctttcgcccactgacaggctatcagccccacgccgccagcggccgcgtgaaacaggaacatctcatcaggcttaatttcataggttttgcgcagcagataccagaccgttaatcctttgaggaacgacgcggcggcctgttcgaaagagatagcgtccggcaggaccgccgctttgtcggccagcacattgtgtaccgtgctgtaggcgccgagcgccgactgggcgtacaccacccgatcgcctaccttaatatgcgtgaccccatggccaactttactgacgatgccggccgcctcggtgcccaggccgctcggcagcgacggcggcggatagaggccgctgcgaacataggtgtcgatatagttgatgccgatggctttgttttcgacctgaatctcatgttctgcgggatcgcgtggcgtgaactcaaccgcctgaagcacctccggtcccccgtgtttcgaaaattcgatgcgtgttgccatgttcgctcctgtgttgttccgagattattcagtaagcttaacagcctgcgccggcggcgacggattttcttacccgcctcaggcctgccacgcttaatgggttctttagcggcaatggctttctcgctatactgtcacgctcttttccggatcggtgaaatgttaggctatggcaggaaataaacccttcaacaaaccacagacagaaacccgcgaacgcgatccgcagctcgccgggctgaaagtcccgccgcactcgattgaagcggagcagtcggtgttgggcggtttaatgctggacaacgagcgctgggacgacgtcgccgaacgcgtcgttgccgacgacttttatacccgtccgcaccgtcatatttttaccgagatggcgcgcctgcaggagtccggcagcccgattgacctgattacgctcgccgagtcgctggagcgtcaggggcagctggacagcgtgggcggcttcgcctatctggccgaactgtccaaaaacacgcccagcgcggctaacatcagcgcctatgccgacatcgtgcgcgaacgcgcggtggtgcgcgaaatgatttcggtggccaacgagatcgccgaagccggcttcgacccgcaggggcgaaccagcgaagatctgctcgacctcgccgaatcccgggttttcaaaatcgccgaaagccgggccaacaaagacgaagggccgaagaacatcgccgatgtcctcgatgccaccgtcgcccgtatcgaacagctgttccagcagccccatgacggcgtcaccggggtcaataccggctacgacgacctcaacaaaaagaccgccggcctgcagccgtcggatctgattatcgtcgccgcccgtccatcgatgggtaaaacgaccttcgcgatgaacctcgtggaaaacgcggcgatgctgcaggacaaaccggtattaatcttcagtctcgagatgccctcggaacagatcatgatgcgttctctggcctcgctgtcgcgcgtcgatcagacccgcattcgtaccggtcaactggacgacgaagactgggcgcggatctccggcaccatgggcatcctgctggaaaagcgcaatatctatatcgatgactcctccggcctgacgccgacggaggtgcgctcccgcgcgcgtcgtatcgcccgcgagcacggcggtatcggactgattatgatcgactacctgcagctgatgcgcgtgccgtcgctctccgacaaccgtacccttgagattgccgaaatctcccgctcgctgaaggcgctggcgaaagagctgcaggtgccggtggtggcgctgtcgcagcttaaccgctcgctggagcagcgcgccgataagcgcccggtcaactccgacctgcgtgagtccggctctatcgaacaggatgccgacttaatcatgttcatttaccgtgatgaggtctatcacgagaacagcgatcttaaaggcatcgcggaaattatcattggtaaacaacgtaacggtccgatcggcaccgtgcgactgacctttaacggccagtggtcgcgtttcgataattatgccggtcctcagtatgatgatgagtaatccttccgccttcttttattaaggaattcaaatgcaagcggcaactgtagttatcaaccgccgcgctctgcgacacaacctgcaacgtctgcgtgaactggcgcccgccagcaaactggttgcggtagtgaaagcgaacgcctacggacacggtcttctcgagaccgcgcgaacgctgaccgacgccgacgcctttggcgtcgcccgcctggaagaggcgctgcgcctgcgagcggggggcatcgcccagccgatcctcctgctggaaggcttttttgctgcggaagacctggcggtgatcgccgcccagcgcctgcatacggcggtgcatagccccgaacagctggcggcgctggagcaagccgatctccccgagccggtgaccgtgtggatgaagctggataccggcatgcatcgcttaggagtgcgcccggaggaagccgaggcgttttatcagcgtctgagccagtgtaaaaacgtccgccagccggtgaacgtggtgagccacttcgcgcgcgccgatgagccgacctgcggcgccaccgaacgccagctggacatcttcaccacctttaccgaaggcaagccgggcttgcgctctatcgccgcctcgggcggcattctgctgtggccgcaatcgcattacgactgggtgcgccccggaattatcctgtatggcgtgtcgccgctggacgatcgctccaccggcagagatttcggctgccagccggtgatgactctatcgtccagcctgattgcggtgcgcgagcataaagcaggggagcccgtcggctacggcggcacctggatcagcgaacgcgatacccgtctcggcgtggtggcgatgggctatggcgacggttatccgcgcgcggcgccgtcgggcacgccggtactggtcaatggccgggaagtgccgattgtcggccgggtggcgatggatatgatctgcgttgacctcggaccgcaggcccaggataaagccggcgacgcggtagtgctgtggggagaggggctcccggtagagcgcatcgccgagataacgaaagtgagtgcttacgaacttattacgcgactgacctcccgcgtcgccatgaaatacttcgactaagcctctggcgtaccggatagcacagaggctgatccggtacgcaccaggcctgcggcgctcaaaaaagcggtttataccgctgcgcggtcactttcccctcaacatcctctcgacctgccgtcatatccggtttattgtgtaagaacctgccccatgtaaacctggagatacatcgcgtgtttcaaaaagttgacgcctacgccggcgaccctattctttctctgatggaacgcttcaaagaagacccgcgaagcgacaaagtcaacctgagtatcgggctgtactacaacgatgacggcattatcccgcagctgcaggcggtggcggaagcggaagcacgcctgaacgccgagccgcatggcgcctcgctgtatctgccaatggaagggttgagcggctaccgtcaggcgattgcgccgctgctgtttggcgcagagcataccgcgcttaagcaaaatcgcattgcctctattcagacggtcggcggttcgggcgcgctgaaggtcggggccgacttcctcaaacgttactttcctgagtctcatgtctgggtcagcgatccgacctgggaaaaccacatcgccatttttgaaggggctggcttcgaagtaagtacttacccctggtttgataaagccaccaacggcgtgcgctttgaggacctgctggcgacgctgcaaacgctgccggcccgcgatattgtgctgctgcacccttgctgccacaacccgaccggcgccgacctgacgccagcccagtgggaccgcgtggttgaggtattgaaagcgcgtcagctgatccccttcctcgacatcgcctaccagggctttggcggggggctggaagaggatgcctacgctattcgcgccatcgccagcgccgggatgccgatgctggtcagcaactcgttctccaaaattttctcgctgtacggggagcgcgtcggcggtctgtccgtggtctgtgaagacagcgaaaccgcgggccgcgtgctggggcagctgaaggccaccgtgcgccgcaactactccagcccgccgagctttggcgcgcaggtggtggcgacggtgctgaacgatgcagctctgaaagccacctggcaggcggaagtggacgccatgcgcgcgcacatcctgaccatgcgccaggcgctggtcgacgcgctgcagcaggttgccccgggcagcaaagtggattacctgctcaagcagcgcgggatgttcagctataccggatttagcgcggcgcaggtggatcgtctgcgcgatgagtttggcgtctacctgattgccagcggacgcatgtgcgtggcggggttaaactcacgtaatgttcagcaggtagcgaaagcttttgccgcggtaatgtaagccgctctccagcaggttgtctctgccggtcaacgggcaggggcaacccctcggatgtgatcatcctctttttctatgacatctgcgcgaaaaaggcttttcatccatgccgccggcgggtaaggtcgggacgttgataagcatgcacattattgaaaacaataatgattgatagatttagggataaatatgcgcaaacttactctcgcccttgcggcggcttctctcctgttcacgctgaacagcgccgttgtggcgcgcgcctccacgccgcagccgctatgggtcggcaccaacgtggcccagctggccgagcaggcgccgatccactgggtttcggtggcgcaaattgagaacagcctgctggggcggccgccgatggccgtcggctttgatatcgatgacaccgtcctcttctccagtccgggtttctggcgcgggcaaaaaaccttctctcccggcagcgaggattacctgaaaaacccgcagttctgggaaaaaatgaacaatggctgggatgaattcagcatgccgaaagaggtggcgcgccagctgattgcgatgcatgtgaagcgcggggacagcatctggttcgtcaccggccgcagccagaccaaaaccgaaaccgtttctaaaaccctgcaggatgattttctcatcccggccgccaatatgaatccggtgattttcgctggcgataagcctggccaaaacaccaagacccagtggctgcaggcgaagcagataaaggttttctacggcgattcggataatgatatcaccgccgcccgcgaagcgggcgcccgtggcatccgcgtgctgcgggccgccaactcctcctataagccgttgccgatggctggcgcgctgggcgaggaagtaatcgtcaattccgaatactgatgaccgcctgaacgcgataaacggcagcgacggcgctgccgtttttttatgcaaaatcaggggtggaaggttttaccttttcacgtattgctgcacacttagaaggattcattcgcaaaaggagtcaatgatgtggtatcagcaaaccctgacgcttgggccaaaatcccgcggttttcatctggtcaccgacgaaatccttggccagatccgcgggctgtccggggtgaaggttggcctgctacacctcctgctccagcatacttccgcttccctgacgctcaacgaaaactgcgatcccaccgtccgctatgacatggagcagtattttctcaacgccgtaccggacaatgcgccgtatgaacatgactatgaaggccctgacgatatgccgtcgcacatcaaatcatcgatgcttggcgtgtcgctaatgctgccggtcgaggacgggcgcgtcaggttgggaacctggcagggcatctggctgggggagcatcggatacacggcggttcgcggcgcatcgttgcgacgctcatgggggaataaaagatgacaatttcggagttattacagtactgcatggcgaaaccgggagcagagcagagcgtccacagcgactggaaagccacgcagattaaggtctcagacgtgctgtttgccatggtgaaggaggttgaggaccagcggccggcggtcgcgctgaaggcgagtccggagctggctgagctgctgcgtcagcagcatcgcgatgtccggcccagccagcatctcaataaagcgcactggagcaccgtctatctggatggctcgctgccggattcgcaaatctactatctggtcgatgcgtcttatcagcaggcggtgaaaatgctgccggagccggtccggcagcagcttacccgctaattatttcagcatgggcttgaggaagcgcgcggtgtgcgaggcttcgcactcggcgacggtttccggcgtaccggagaccaggatttcgccgccgccgctgccgccttccgggccgagatcgacaatccagtcggcagttttaatcacatcgaggttgtgctcaatcaccacgatggtattgccctgatcgcgcagctggtgcagcacttccagcaactgctggatatcggcgaagtgcagaccggtggtcggctcatcgaggatatacagcgtctggccggtaccgcgcttggacaactcgcgcgccagcttcacgcgctgcgcctcgccgccggacagggtcgtcgccgactggccaaggcggatataggtcaggccgacgtccatcagggtttgcagcttacgcgccagcgccggtacggcatcaaagaattcacgcgcctcttcaatggtcatatccagcacttcgtggatggtcttacccttgtacttaatctccagcgtttcgcggttatagcgtttgcctttgcactggtcgcacggcacgtagatatccggcaggaagtgcatctcaaccttaatgacgccgtcaccctggcaggcttcgcagcgcccaccgcgaacgttaaagctaaagcgccccggcgtatagccgcgtgagcgagactccggtacgccggcgaacagctcgcgcaccggggtaaacaccccggtataggttgccgggttggagcgcggcgtccggccgatcgggctctggtcgatatcgatcactttatcgaaatgttccagcccctggatatcgcgatacggcgctggttcagcgatggtcgcgccgttgagctggcgctgggcaatcgggaacagggtatcgttgatcagcgtggatttacccgagccggagacgccggtgatgcaggtaaacaggcccactggcagggtgagcgttacatccttcaggttgttgccgcgcgcgccggtcagtttgaggactttctccgggttggcgggcacgcgctgcttcggcacttcaattttgcgtttaccgctcatgaactggccggtcagggattccgggaccgccataatggcctccagcggcccttccgctactacctggccgccgtgaacgccagcgccgggaccgatatcgatcacatggtcggcggcgcgaatggcgtcttcgtcgtgctcaacgacgatcaccgtgttgcctaaattacgcaggtggatcagggtgccgagcaggcgttcgttatcgcgctggtgcaggccgatagagggttcatccagcacgtacatcacgccaaccagcccggcgccaatctggcttgccagacggatacgctgggcttcgccgccggagagcgtttccgccgagcgggagagcgtcaggtagttgaggccgacgttgacgaggaatttcagacgatcgccaatctctttcagcactttttcggcgattttcgcccgctggccggagagcttcagattgttgaagaaatccatcgcatggccgatgctcatatcggagatggtcggcagcggggtgttttccacaaacacgtggcgcgcctcgcgacgcagacgcgtgccgtcgcagctggcgcacggacggttgctgatgaacttcgccagctcttcgcgcaccgcgctggattccgtctctttgtaacggcgctccatgttatgcagcacgccttcgaacggatggcggcgcaccgaggtatccccgcggtcattcatgtatttgaattcaatactttctttacctgaaccgtacagcaccactttctgcacgttggcgctgagggtgccccatggcgcttcgacgtcgaatttatagtgctccgccagcgacttcagcatctggaagtagtagaagttacgccgatcccagccgcggatggcgccgcccgccagcgacagctcgggattttgcaccacgcgatcgggatcgaaatattgctgcacgccgaggccgtcgcaggtcgggcaggcgcccgccgggttgttaaaggagaacagacgcggctccagctcgcgcatgctgtagccgcagatcgggcaggcgaagttggcggaaaacagcagttcttccgctttctcatcatccatattagccacaatggcggtcccgccggagagctccagcgcggtttcgaacgactcggccaggcgctgcgccagatcgtcgcgcaccttgaagcggtcgatgactacctcaatggtgtgcttcttctgcagctccagcttcggcggatccgacagatcgcagacctcgccgtcgatccgcgcgcggatgtagccctgactggcgaggttttccagggttttagtgtgctcgcctttgcgctctttaataatgggcgccagcagcatcaggcgcaggccttccggctgggcgaggacattatcgaccatctgactgacggtttgcgccgccagcggcacgtcgtgatccggacagcgcggttcgccgacgcgggcgtacagcagacgcagatagtcgtgaatttcggtaatagtacccaccgtcgagcgggggttgtgagaggttgatttctgttcgatggaaatcgccggcgacagcccttcgatatggtcgacgtccggcttctccatcagcgacaggaactgtcgcgcataggcggagagcgattcgacgtagcgacgctggccttcggcatacagggtgtcgaaagcgagtgaagatttgccagacccggaaagcccggtgacgacaatgagtttgtcgcgcgggataacgaggttgatgtttttgagattatgggtgcgggcgccccgaacttcgatcttatccattcacctttcccggtaggtagatacacggattgcctggtttgcttgaaggacaaacggcagaaacggctaattatgacacaatttaacctgaatgaatatacagtatcggaatgcaaattcgggtcgagtgtgcaacaatgccgtagccgggtactatctctggaatcagcctcgcagctattaaaatgctacgtggaaatggtacactcgcgcgtttacactattaagaaacgtattcaggagacacgaacatggccagcagaggcgtaaacaaggtgattctcgtcggtaatctggggcaggacccggaagtacgctacatgccaagtggcggcgctgtcgccaacttcacgctggcaacttccgaatcctggcgtgacaagcagaccggcgaaatgaaagagcagaccgagtggcaccgcgttgtgctgttcggcaaactggcggaagtcgctggtgagtatctgcgtaaaggctctcaggtgtacattgaaggccagctgcgtacccgcaagtggaccgatcaatccggtcaggacaaatacaccaccgaagtggtggtgaacgtgggcggcaccatgcagatgctgggcggccgtcagggcggcggcgcaccggcaggcggcggccagcagcagggcggttggggtcagccgcagcagccgcagggcggcaaccagttcagcggcggcgcgcagtcccgtccgcagcagcaggccccggcagcgccttccaacgaaccgccgatggacttcgacgacgacatcccgttctaaggcttgccttaggcgcactgtctgcgcagtcgaaaacagaaagccccggtttcgccggggctttttctttgttattcctgcaccgtcatttcaggatggaatttgacctacggtaacgagcgattcagatgacgggcacctgagcggtggcggctgtcgccacgctgggctgcggtttggctggctgcgccaccggctcctgccgcggtacggccgtcgctttctgtttgcgggccatgtcatcgacgatcagccgataggcgatgtaatacttatagatattgctgacgtaggttaccgtctcggcgccaattttttctgccgccatattttcgacgttaccgaaccagacgttcgggtcaaatcctcgctgtttagtcatggtgcgcaggcgggcgatacgcgccggacccgcgttataggaggcaaaggtaaacagcgctttatcgagccgggtcatgggctcatcggcatagtaccgatccatcatccagcgcatgtatttcacgccggcatggatattgggatccagctgtttaatatcgcccaccttcagctcttttccagtgctgggcatcacctgcataacgccgatggcgccgacgtggctccgtaccgactgattcagccgcgactcctggtatccctgggccgccatcagcagccagtcgacgtcgtaacgatcgccgtacttgcggaagacatctaccatcgcgaggaatttgcgtcgttccttactcgccgcggcatttttgacatatttagcatttttcaggtaacgcagcaggagagtattgcccagcgtggtgccctgacgattctttttgacgaagttgttcagtaccgtcagcagctgcgagctgtctttgcgtaccgcccaggcaatgtcgccgccgtcgcgcagcaccacattgtcatggacctgaatttttggaaacacctgtttccagaacaacgctttatgctgatcgacgacgatcagcggaatcagcccggcgttgagcatttccagcagatcttcatcctccagcgcttccggcgccgcctccagtatcaccggtgggcgcgactcaccggcaaatcgggcgttcagcgcttgcaggctgtcgtaatagctggaggagcggcgaacaaagacggtttgaccagagagttgctccaggctgtcgaccttcggtgaagccgggccggagatcagtaattctttcacgttgctgtagagcggctgggcgaaatcgacctgtgcttcccgcgagggcgtgatagtcagattggcagccgcaatatcgcctttaccttcattaagcgcgataaagagattgtcccgactgaccggcacaaaaacgatatgcagcttcaggtggcgctgtttgagctttttatccttcgctagctgtttattcagctcgttttccagcgcgataaaaatgtcgtgcgtcgccccgcgctgggtgcctttatcaataaaaaagaaggtcttgctgtaggtggttaatacccgaatggtacgacggtcgatcatgccaggcaaatcgcctctccatggccgtagcatatcgtcgatatgaatcgatagcgtgttgtcttcggctgctgccggcggcgctttttccgcctctactgccggcagcagaggagcgaataacagtgtcgcgaggcaggtgagccaggcgataaacagacgtgatagcgagtaggcgttcatggaggaatactccgcaggggatgtgattattttagcagaacggccgccgttagctgggaacgacaagggcgtaaaaaacataacaatgccgacaaatagttttctcccattttatcgcttactattaatgtgtttttatctttaatttaactatggagataatatggcgaaaatgtgtgtttttaatgataaatagaaaataatgatgatgtttttattttatttctccccatctgttttgttgtaaccttttgattgttagtgtttattttatttttctccgatgttgattattatcatcttgataatgaatctcatttttattaccgtaacacggcacattactctaatgacacgctgtctggattacgctatcaaagaatagcgcgcagcgctttttctctaatgatgaaacagggcacttaattttattatgcctcacgcttttttttattcccattaatgccgggaaggcgctgacctgcgccaaaatctggcgacgcgctgaggcaagtattttatcccattgttttttcaattggggaaggcgttatgcccgacagcaacagaaaacagggcatattctatgaaatacacgtctcacttcccgctggggatcgtcattcctctgctcgcctgtagcgtgccgctgcaggcggcagagaacatgaccgaacaatcgacgcctgacgagagcgccgccactgccgaaaatcacgaggagacgatggtcataaccgccgccaggcagaacctgcaggcgccgggcgtgtcgaccatcaccgcagaagagatccgcaaacatccccccgcccgcgatgtgtcggagttaattcgtacgcagcccggggtaaacctgaccggcaactccaccagcgggcagcgcggcaacaaccggcaaattgatatccgtggcatggggcccgagaatacgctggtgctggtcgatggtaaaccggtgaccagccgtaactcggtgcggtatggctggcgcggcgatcgtgactcccgcggcgataccagttgggtgccagcggagatgatcgatcatatcgatgtgatccgcggcccggcggcggcgcgctatggtaatggcgcgatgggcggggtcgtcaacatcgtgaccaaaccgaccacgcgagaatggcacgggtcgtggaatacctatatgaatgctccgcagcaccgtaaagaaggggcgacgaaacgtactaactttagcctcaatggtccgctgtcggacagtgtcagcttcaatctctggggtaatctgagtaaaacccaggccgatgcacaggatattaacgccgggcatgaagcggaacgtaccggttcctacgccggttcttatcccgccggacgtgaaggggtggtgaacaaagatattcacagtaagctgcgctgggagtttgccccgatgcaggccctggagtttgaggccggttacagccgccagggtaatctctatgccggcgacacacaaaacaccaataccagtgcgctggtgaagagtatgtacgggaaagagaccaaccgtctctaccggcaaacttacggtgtaacatggaccggcggctgggataatggcgtgaccagcaacagctatgcccagtacgaacacacccgtaactcgcgaatggatgaagggctggcgggcggtacggaagggatcttctccagtagcgagttttcagatattgatctggccgatgtcctgctacatagtgaagtgaatattccgtttacgctgggggtcgatcagaatctgacgctggggacagaatggaatcagcagcggatgaaagatggcgtatcgacaacccaggcgctctcttacggcactatcgatggcgtatcggctaccggtcgtagcccgtactccagcgccgagatcttctcgctgtttaccgaagataatatggcgctaacggacagcaccatgctgacacccgctctgcgcttcgatcaccacagcatcgtcggcaataactggagtccctcactgaacctgtcccaagagctgacagacgactggacgctgaagctgggcattgcccgcgcttacaaggcgcctaacctctaccagttgaacccgaactatattctctacagcaacggtcaaggctgttacgccagtagttccgcctgctatctgatggggaatagcgatctgaaagcggagaccagcgttaataaagagattggtcttgagtacaagcatgatggctatcaggcggggatcacctggttccgtaacgactatcacaataagattgagtcagggtatgcggcggtgggtaccgccagcaacggcaccaccaatatctatcagtgggaaaacgtaccaaaggcgttagtggaaggcctggaaggaacgctgaatctgccggtgggggaggcggttaactggagcaataacctgacctggatgctgcagagcaagaataagacgaccggcgaccgactgtcagtgatcccgcagtttaccctgaactcgactttgagctggcaggttcgtgaagatctctccctgcagagcacctttacctggtatggccgacagaaaccaaaacgcttcaattataagggcgaggcggtcagcggcagcgaactaaacgaagtcagcccatacagcattgtcggcctcagtgcgacctgggaagtgaacaaaaatctgagcttcaccagcgggatagataacctgtttgatattcgccactaccgggcagggaatgcgcaaacgaccggcaacgcgacgacgggagcttatctgtatggcgcgggtgccgagacctataacgagtcggggcggaccttctttatgagcgttaatactcatttctgatgatcctgatgaggagtaaaccgggtgcagcgcgacccggtttttttatttcagatgagagcggaggaggcggttataaatcgtgacaaaatcttcacgccctctacattattagctcaacatatccttttatactgatttccgtcgcgcaaggtcgttgatcccgaccgggctcgataatagcatcctgctatttcccttctgtaatatcccctgtcccccttccattcccaaccgcagcgatgcggaggagggggacctccttatttttgccgcgtgctctgatagcgatactgagtgggcgtgagcgcatgatattttttgaaggtacgattaaacgcactgagatcgtcataaccgaccatcatacaaatatcgacgattcggtaaccaggcgttgtcagtaataaacggcaacacagcgacatgcgctgctggcggatatattccattggcgaacgatcaaaataatgacggaagagccgaaacaaatgccagggggaataaccagagatatcgctcagatcgtcgacggtcagtttcttatccagattattatcgatccacaagagcaggtcgcttaagaccgattgctggagcgttttgctacgcataattgcggccaatcccataacgcagggctcctcagtgaggagcccaggggtttattgaacagtgagtatgccgtggcgaacctgataatttttttgattatcagggccaatatagtcgctggcgggttttgccagctgcagatgaccaaaggcggtagtttgctctgcatgataattttcgccgtcattcacgtcgccgcgcccgttataatgggcaatggccgggaagggatacaccggacgagtcgcgataaccgctggagcggcgtcagcgtaaggctgactgactttctgcacgccgtgaaactgcgtttgcgcatctggtttttctgtcatcggcggcaggtcggcagcggctgttgcccgtttgccggccatgatctcctgcggcgcgataccttcctcggtccagcgcatcagcggagtaaggagatcaatttgatcgtaaccttcgccattaccgcaatgggctaccccaggcagcaggaataaccgcaggaaggtatccgttgcggcatggcccatctctgcttctacgccgcgataataggcgatagaaaaggccggactgacggagtcatcggccagaccgtgccagaggataagcttgccgccgcgctgttgataggcatgaagattggtatttgccgcgttatagagcggcgccagttgggcgacggcgtcaaaattctgctggttaagcgggaaatcccgcatcgattggatcttctgtttttctcctggcaggagcacggattgcagagccggtagtaccatcatttccgacattgagtggccggtcggcgtctcgggcaccggccagcgtagctcggaacccagcggcagaccgcccgcgacgaactgggcgccgtggctgtcgtaagcgccgcggtagagctttttcaccacctcgatctcttcctgcgtcaggcaggtagaacggtcccgagcatcggcaggacagcgggggagccatgactcagagaactgacaggcatacggattttgcaggataccatcctgcacgccggaaagcgtcgggcaatgagccagcacggcctggtgaatcagaggaaggcgatttttcagcaggatagcggtaccgtccgggcgctgattggcggccacattccagccgtggaagaaggagttctgaaactggaaaaaggccgctggcgcgccagcgctgataccgtcaaaatcctgcggaaagcgctgcgcttccatcaatgcttcgcgaccgccgtctgagcagcccataaagtaggcatactttggcggctggcggtaaagcgtctgcatcaccgctttggccagcacggcggtcaggtggttggcgcgccaggcaaaatcgatgcgcttttgcggatcttcggcccatgacgcatccatcatactgccatggtgccccatatcggttgctgccaccacaaactcgccgttcattgccggcaggcagccgctggcattcgacagactcaggttaatactcccgcacagtccgccacagccgacctgcaaaaaacgttgactccagcgttgggtcggcagggcaatctgcacgccaatctcaggggcgatagtggcgctcaccttgcaccagcttccctgcgcggaggtctgcatttcagtgtgattgatagtgacctttgcgccaacggccgcgctgaagtcggtagcgcttagcgcatcgcatgtcagcgcgggaagaacgatcggcagactggcgacagcctgcgtgggtgaagcgaacgataacccgaagagggcgcagaggatgatgggcaagattgtcttgagtaagcgtgtcatacgcagttccctgtggctgatgatgggaggcggcaggatggcgaaacctatgcctcaccttccctggcgaggcgccactgcttggctattgtagataacgatagactttccttgatgccttgataaggcgaccctactgtattctgctattttgaggaaaatatggagatgtttgccaacggcgtctggcggtgaattcggggtagaatgttgtgatatcagttgcataatttattcaatttctcttcattaaatctgctgggttgcaggttatttttctccctgttcctggtgatcccagagagcatcattcctaacgagatccttccccctttccattaataagaaagggggctttttattaataaaacgttcaggcaaatctaaatatagtactggtgttggccattagaaccatgcgcttcagaaaaagttccatcattaaatatatttttaaagatgctttaacatccattttttctccattttgtcgccataattgcatgtaattctgcgcctcgctcaggttattttctgtcgcatattttagagatgcatcctgaacaaataagctcaacgccagcaggacactgctattgctcattatctcgtagacgacacattcatgttaaaaaagactcatatcatcagcggattattgatcacccctttaacgttatatgccgcaacatcatatcaagttgatgatatccgttttgaagggctacagcgcgtgaccgtcggggcggcgctattaagtatgccattgcacgcgggagatgcggtaacgccagaagatgtcagcgaggcagtgcgcgcgctgtatgcgagcggcaatttcgaaaatgtgcagatcctgcgcgatgggaaaacgctggtggtgcaggttaaggaacggcccactatcgccagcgtcagtttttccgggaataaggcagtgaaggatgatgcgctaaaggaaaatctcaccgcgtccggtatttctgcaggtagcgcactggacagaaattcgcttagcgaaatagaaaaggggttgcaggatttctattacagcgcggggaaatacagtgcgcaggttcacgcggtggtgaccccgttaccgcgtaatcgcgttgacttaacgttcgtctttcaggaaggcatctcggcgaaaatcgcacaaataaacattatcggtaatcaggcgtttcgggaagagacgctcctggaccagcttcagctacgtgataatgtgccgtggtggaacgtggtagccgataaaaaataccagaagcagaagctggaagccgatctggaaacgctgcgcagtttttatctcgatcgcggctatgcgcgctttgctatcgagtccacgcaggtcagtatgacgccagataaaaaatccctgtatatcactatcgccctcaatgaaggcgaacgttatcgggtcgaccgaactcaggtgacaggcgatctggctcagcatgggccggagatcgaggcgcttgcccagccgctggcgggggcatggtatagcggggcgcaagtcaccacggttgaaaatgagatcaaaaagcactttggtaagtatggttatgcctggccgcaggtgacgtccacgccggaaatcgatgatgctcatcaccgcgtggtgctgcatattcaggtcaacgcgggccgccgctactcggtacgccagatccgcttttccggtaacgacacctcccgggacgcggtgctgcgtcgtgaaatgcgccaaatggaaggggcgtggctcaacaacgaaaaagtcgatcaaggaaaggtacgtcttgatcgaacgggtttttttgagaacgttgaacagcagatcgttccggtcaatggaacggcggatcaggtcgatgtggtctacaaggtgaaggagcgcaacaccggctcattcaatgtgggcctgggatttggtacggacagcggcgtgagctatcagcttggcgtgacgcaggataactggctgggaacgggtaatagcgttagcttcaacgggacgcgcaacagctaccagtcttatcttgaactgggggcgacgaacccgtggtttaccgtagatggcatcagcctgggcggaaagattttttataacagctatgatgcttctgatgcggatgccgggagctataaccagcagagctatggtttaggtagtacgctagggtttcccattagcgaaaataactccctgaacctgggactggattatgtccataatcgcctgaccaatatggatccggagctgacgacctggcgctacctcagctctcggggaatcgagcccagcgtggtgacgaaagatggcgacagcggcgcaaaatatagcgccaacgattattttgtgagtcttggatggggctacaacgatctcgatcgcggcttcttcccgcgtgcgggaaacaagagcagcctgagcggtaaagtgacgctccccggttcggataatagctactacaaactctcttttgacaccgcccagtatctgccgctgagcgagaacaagcgctgggtctggatggaacgcctgcgcgcaggctatgccggcgggttagacggcaaaagtgtgccgttctacgataacttttacgcaggcggttcgtcgtcagtgcgcggattttcttctaacactattgggcctaaagcggcctattaccgctgtaacggtagcgaaagcagctatagcgcctgcccgctggacgcctcgtctgatgcggtcggcgggaatgccatggcggtgctgaacagcgaatttatcattccaaccccctttgtgaatgacaaatacgccgatagtctgcgaacctcgctgtttgttgacgcggggacggtctggagtacatcctggcacaacaccgcgcagacgctggcggcagggatccctgactacggcgatccgagtcatattcgtctctccgcggggattgccgtgcagtggatgtctcccctcggtccactggtcttctcctgggcagagccgtttaaaaagtacgatggtgataaagcagaacagtttcagtttaatatcggcaaaacctggtagggctccaacggggcctgatagaccggcgtggctatattctgtggactgtcctccgatatagcgattgagcagaatatactcaaccgctatgtcgatattatcgctaaggaatgcgatctggcgggacacccgcgacatttacccgagcgcggtctgcgggcctcgcggacctggtgacgtacgacgaggtaaccgcgcaataaatagctgcctgctactatcctctcttcttgccaaaccgcgggtaatactcagtgctgcatcatctaataccaatggctgaggcctcatccagagggactaagacgtattgtcaattaagtttatattatcttattttttattatattttcttttttaaggttaatttggctgtttttcatcaggcctaaccataaatttagagagggaaatgaaacgttactaataatggagcatgtcgttaggaattgtcttaaatcacataattgccaggggcgcttgcgatttataacaatgaatgctatcactatatattgtaataatttgtagcatctttataaggaaggaatatgaaatggactattcttaataccctgatctgcccgcaatctggtatcgccttctcggctatatccagtctgcgtttcttgaaatttatcatgtggtacgaggctgatgtaatcctgttgcccggtgagtcgataagactctattcctcgagagttttaattaatgaccagtatcattcattaaaaatctataatattacggtgtacgacgaggcgcagtgggaaaaattacgtgagcgaccatcgtgcccttaccatgccggtggcgagcggtctgactcctgtttttaccagtccttttgcacgattaagcgttgcccgaataatattccccgcagtgaaccctggcgttagccagtccacgccgccggtcagacaccggcggcgtgacgtcatttcgccagcagggcggccagtcgaggctggacgcttgcgcagccggccagcacgaggttgcctcgccgcaggcccgcattggcgagaaacgcattgcacgttccgcccgcctcctcaatcaatagcatgcctgccagcgcatcccagctgttcatatgcgcttcataataggcgtggagctgaccggcggcgacatgcgccagcatcagggcgcccgcgccaaaacggcgatactccagaccggcgtcgagcagcgtgtcgatggcccgggcgtagtcgctggccggggcccggctggagcgccccatgccgatcaccaccgcatcgggctccggctcgcgtagcgtcaggcgccgaccgttgagatacgcgccttcgccgcgggcggcgaagaaaaattcatcgcgatcgggggcgtaaatgatgccgagcgacagttcaccctggcacactcgtgccagtgagatgcaccagtaatccatgccgaggataaagttggtggtgccatcgacaggatccagcacccagacggtctggtcgtcgccttcaaaaccgctctcctcgccgaggaaaccctcctcgggaaagtgggcctgtagccagcctttaatctcttgttctaccgcgagatccgcctgcgacacaaagtcctggcgcgcttttttatcgacctgtaatcccgcatcgcgcagcgcctgggcgtgggcgcctgcctggcgaatcaaggcgcataatgactctcgttgtgcttccgtcatagtcctgctctcatataacaaagggcgacgtgcgccggtgaattaaggttacctccacccaggtggtgcgtgaaggttgcgaagggtcggcggcgcgctccagaagccgggcgagcgcctggcgggcgatcgccgccacatcctgatgtagcgtggtgagctgatagctatattgcgcggtcgtcggcgtgttatcaaaaccaatcagctgaaaatccgccggagcctctctgccgcgctggcgcattccatcgagaaagccacaggcaagctgggcgttggcgcagaagatcccctccagcgcctcgtcggcgagcgccgcagcctgtaacccgcccgcgtaaccttcttgcttacaggcgaggatcgccaggtggcgttcgacgtccactccgcgcgtttgcagcgcccggccgaacgcttccccgcgcatgcggccggcccaggtggaaggatggtggttgagccagccaaagcgctgacagccgctgcgcagcagttggtcggcggccagttcggcgccggcggcgttgtcagaacaaacgtaatccacgccggggatcgtcggctgtcgattaatgcccacgaccggaatatgctgctggacgcactcgttcaccagcgcctccggcggctggccggaggtgacgataacgccggagacgcgaaactgagcgaaacggcgtaaggtctgcgccagatcctgctcgctgtggatctcgctcaccagcgcctgaaagccctggcgctggatctcgttaagcagcgcatcaagcagggtactgcgaaaaggatcactgatgcgcgagacgatcacgccgattaagtggctgcgctggcggttcagcccctgggcgaggaagttaacctgataccccagctcttcggcggcgcgcagtacccgcgcccgggcgtcgggagagatgctgccgttgttgctcaacgcccgggacaccactgcccgggagacgcccgctcgccgggcaacatcctgggcggtgacgctgggtttgcgtgggttcataggaggtacgtctcgtcagtgggcgtgggacgcggcagcgttaaggtgagtccatcccgggaaacgaataagcccggccacggctgacaggcctgctttagcgccgacagagaagcatcctcgcagtgatagagccccatcgccgggagctgcagcgttctgaacagcatcaggcaggaggggaaatcgccatgcgaggcgtcatcgtccagggctgctaccgaggcgcactcctgaaacgccagcccggcgccggccatcagggctatcgagtcggcggtcggtcggccatcgccgctgtaaaacagcgtctgcccggcaatggtgatgcggatggcgcgattactcagctcatgctgggtgggggcagtgcggatctgccagtcctgccacgtccaggcttcgcggcattcctgccagtcgatggtgaaaccaaggtccgcctgcggccagttcgccagcgcggccagctgcatgagcaccggctgctgcgccggctggcagtagataatgactggcttctgacgggaataacttttccagtggttcagtagcgccgtcaggccggtgcagtggtccgggtgaacgtgggtgaagtagatcgcgtcgatatcgttgacctcgccgccgcgctgccagagcgcgcggggaacggtggggccgcagtcgattaaccactgtttgttgtccgcatcgatcacccgcagcgcggaggtattttgcgtgcaggaaaaggcgctcccgcagccaagcacatctattttcatttaccctcgccaaaattttttgccgcttaattaaattgtcataaatacccgacaaagtaggctcacatcatgtcgattcaacgttgcattttttttacagccaaatgaacacgtgttcaccttgctaaaaaaaatgccgcagcagcgctttcaggtagcgaatatgagttatttacagatctccggccttaaaattagttatggcgataaggtggttttacataatatcgatctggcggtagagcagggagagatgattgctctactgggcccgtcgggatgcggaaaaaccacgctgctgaacgccctctgcggctttattccggtgcaaagcggcgaggtggctattgccagccgaacgatcactcatcttgcgccggagcagcgcaatatcaccatggtatttcaaagctacgccctgtggccgcacctgacggtagcgcgcaatatcggctatggcctgaagctgcgcaaatggcgcggggcggatatcgcgcggcgggtggcggagctgctgcgaatagtcaatctcgaagggcttggcgaggtgaaagtgaccgaactgtcgggcggccagcggcagcgggtggcgctggcgagagccctggccatagagccccaggtgctggtgttggatgagccgttatctaatctggatgccaaagtgcgcctgaatgtgcgccatgaaattaaatctctgcaaaagagactggggttcacgtcattaattgtcacccacgatcagcaggaagccttagtgatggcggaccgcattgcggtattaaatcaggggcgtattgaacaaaccggcacgccggaagaaatatatcaacgccccgcgacgcccttcgtcgctgattttatgggggccgataataaaataatttccggtgaattatccgctgccgcaatatccggtttatctgccgctcagcagggtgacaacgttatttattttcgcagcgccgatgccgcgctcgctgaattaacgcagcctgcgccgcaggaggggctggctctggaaggcgtggtggagcaaagcgcgtttctgggcaatctgtatcgtcacagcgtgcgctgccatgaccgcctgctgctggcggatgccgcgcagtgctggccgacaaaaagccgcgttcggctccatgtgccaacgccggccctgcatatttttcctttaccactatcacagtgatatcagcgtgttcattctggggacaatccatgttgactaagacgaaagcagcgatcgtaacgaccctcttcctgagccttggcgcacaggccgacaccattctcaacgtcgccaccgcgggcgatcagaatatggtggattatgtaaaaacctggctggggccaaaatttgaagccgctcatcccggcgtcaaggtgcgggtgatcggtaccggccccggcgacgccgggtcgaataaaattagcgagaagctaacggcccagcaggagagcggcgcgcagcagtgggatatcgacgtcgcggtagtgcaccagaaggcgggcggtgagcaggtggcaaagggattgctgcaaaaataccgtcaggatattcagaccggcggcatggttagttcgccgagcgccacccaggcgctgggcgttaacgttgacggatacgtgatgccgatgttcttaagccagaccgctatcgcctggaacagcgatctggtcactaccccgccggcgtcgtatgacgagctggtggcctggacgcagaaacacccgcaggcttttggctataacggcatcaagaacggcatgtccggcgtcagctttgtggtgggctggatctacgcctacgggaccgacgcccagcgtctctccgccgggccttatgataaaagcgtcgaaaaaggctggcagcaggcctatgagaagctaaaggcgttcaataaaaacgtaactttcaccccgggcaacgccgggacgctcgatatgctgagccggggggaaatcgccatgggcccggtgtgggtcgatatgttctatagctggaaagatcagggcaagctgccgccgtcgatcaagcttgctttactggcgccgggcatgccgggccagccgatgtattacgtcatcccggcgaaggcggcgaatccgcagctggcgcgcgactttatcgcgctggccaccagcccggaagtgcaggcgcaggggatcgtcaagcagttcaactggtatccgggcatcgacgccgggcaggtgaagccgaagctggatgcggcgacctggcaaaagctgtttgccgaaatctcgccggaagcgctggcgaagtatggcaaaagcttcccgatcgccccctactttgacgatatcaaagagggttacgaaagccaggtggctaattaaacctttttccagcccgggccgccgtcccgggcgcttgcttgtgctgacgccaggtttattatgtccagttcattaaaatatctgctgctggttgccccagcggcgctgatgatcgcgatcctgtttttgtatccgctggggttttcgctggtctcggcgtttaccgcgccgggacagccgttcaccctcgatcacttccgcaaggtctatgcgctctacgccagcgatgtgctcttttcgctgcttattgtgctgatctcggtggcgctgttagcgctgctcgccattaccctgtcggcagtgattgcgctgtcaccctgccgacccgttgtgcgtctgctgggttttttgtatcgcctgccgctgtttattccttttatcgttgttgcccagatgatgcgcacttttctcgccaaaaatggcctgatgaacaatgcgctggtggcggccgacctggtcacgccgctggagacgctctcctggctgggatggaaagggatagtgatcacctttgtctggaagcaactggcctttgccacgctgctgatctgcggggcgatggcggcgctggagtcgtcgcagatccttgctgcacgtaatcttggcgcctcccggccgcggatcctgttcgatatcatgctgccgcaggtcctgccgactatcggcgtggcgctggtgctgtcgacggtgaccatgatgtcggtgctgtcggtaccgttgatgatcggcgtgggaaccccgacgatgctaaccgtggatatggcgtttcgcgtcaattcctatggtgattacgcggtggcgaatgcgcttggcgtggtgtcgctggcgatctgcggcgcgctgtcgtggttttacctgcgccacagcctgcagcaaaagggcggtgaatcatgaaagcgctggccctcgtatcaaccccggcatggtgggtgaaagggcgccgtaaagtgcgcgccagtccggtgctgcagaccctgctgctgctgtttatgctgctggcgatgtttggtccgctgctgaacctgttgatctggaccgtagcggaaagctggtattttccccattcgctgcccagccggtgggggctgaagtactggtatcaggttttcaatccatacagcgatgtctccagctcgctgttaaccagcgtgctgatcgctctgttatcggtgggggtctgtttgctgatttccgtacccgccggctatgcgctttcccggcggaaaatgccattacggatgctgttcatgctgctatttcttatcccgcaggcctttcctaacctgacggtatacatgaatgttgcccgattgttttatcagtggggattgaacggcagtatcgcaggggtggtgctggtgcatagcgtccacggtctgatgtactcggtgtggatctgtgtggccgcgttttcagccatcgacccgctgctggcgcgggcatcgcgtaacctgggcgccgggccggtgtataccttctggcacatcgtgctgccgcaggcggcgccggggatcgttgccgccagcatctttgtttttctggagtcgctggatgagtttaccggcactttcttcgtcggggcgccggatatcaccacgctgccgctgctgctctataacgccagcatgtcgggtaactatcaggtctcgtcgattaccgcgctgattttgctggccccgtcgctgctctttatggtggtgatccataaatttatgcgtccggagatgatggcgaaattagggaaataagggctgcagaaaacgaaaaagcttcccgtcgggaagctttttaacctcaggtcatcatcattggccattctggcggtgtctgactcatgacttcaatcatcacatctttgatattgccccagattttggccatatcaagcagggtgataccgagcaaaccggtggcgaaccagcaggcggcggccaggccgaggcagctgcagatcaccgccagaccggcgtaatcgcttttgcgaagctgaatattcagtgagctggcgagaaacatcagtaccgcgctcaccaggggccagcgcaataatacgacactggtagtaatggaagccattaacctatcctcaaagaaagtcgggagccatggacgacctggcgcgactgacgatggcatagcgctctggtctcaactggcgtactagagagtgatgaaacgccatttctgtttcatcaacttgtgtgaactatatcacacttggcgctttattcaccagtcaaaaaatgagcttttgctgcgtttaataactatgaagtttgtgtggatattggtgagcaaccccgggaagcatattttcattcactgcctaatgattattattctgcgggttttattacctgttcttgtttattacacggagaaaccgagtcagatgcgcgtctattcttaatcttgccggaatatcttccgaatacctgataaataagtattattcatcaccatcagaggtaaaactgacgctcgtgagggctgtcggatgtcagctgatgtctatcgcaatcgcgattgctaacgtgttcgggctaccttaattaaggcatatcgcatggatgtaagcgtaaatgggtgacagtgcgccgcataaggcgctaagactcatcggaacaggtttggttattttattgccagtggtgctggcattgtggtttgcccagctgcgggctaaagccgaaaccattgatcaattacactcattttcgcagctggcgctgcaaaaaacggaaatggtcatccgggaagcggatcaggctcgggctaaagccagccagtatcgcggtgagttgtgttcagcggatcaccagcgttatttactgcatattgtgcgcggcctgctgtatgtggaagatctgatctacgctaacggccagcgctttatctgttcaacgtccgttcatcagcaaaccggctggcggatgccggcggctaattacaccaaaaagccggatgtcgcgatttactattaccgggacacgccgttttatccgggctttgccatgaattatatgcagaaggggccctatgttgtggtggttaatcccttctcgtacagctcggtgatcgccagcgaccgcgatttagcctatggcgttttcgataccaaaaccaacctctttttctcggtaagtaacaatgtcgagcccgcggaactccatgcgttaattcgcgaaggcgataccttttttaatcagaatggccgggtgtatacgatcgcccgctccgctattcgccccatcgccgtcattatgtccacctcgcgggccagctactatcacaacttttgtgaccaggccagtctgacgctgccgctggggataatttgcagtattttactggtgctggtgtggtcgcgcacccgccgacagtatcactcgccgcgcaatatgctgcagcgggctctgagctgccgccagctgcgcctgcactaccagccgattatcgatattaaaaataaccgctgcgttggggcggaagcgctgctgcgctggcctgggtttgacggtccggtgatgaacccggcggagtttattccgctggcggaaaatgaaggcatgattgcccaggtcacggactacgtggtggatgaactgttttatgaaatgggtgagtttctggccagccatccacagttgtatatagccatcaatctctctgcgtcggatttccattcggcgcggctgatttcacagatcagtgagaaagcgcacagctacgcggtctgtatcggacaaatcaaaatcgaagtgaccgagcgcgggtttatcgacgtaccgaagaccacgccggtgatccaggcgttccgcgaagcaggctatgaaattgccatcgacgatttcggcaccggctactcgaatctgcataatctgcacgcgctgaacgtcgatatccttaaaatcgataaaaccttcgtcgatacgctcaccaccaacaacaccagccacctgattgctgagcatatcatcgagatggcgcgcgggttgcggttaaagacgattgcagaaggcgtggagacgccggagcaggtaagctggctctacaagcgcggcgtacagtattgccagggctggctgtttgcgaaagcgatgccggcgcgggagtttatgcagtggttagccaatgctcccgcgcccgcgaacgtgcctcagccgccgcgtcacgcggagatctgatggcgatagtcgctgggagtgcggtcaaactcgcggcggaacacccgggagaaggtttgctgcgagacgtagcccagatccatggcgatatcaaagatcggccgctgggtggttcgcaacgcctccgccgccagcagcaggcggcgctggcgaatatagtcccccagcgtctgatgcatcacggtacggaacatccgctgcaggtaccacttcgagtatcctgactttctggcgactatatcaatgttaagtggttgatcgatatgttcatcaatccattcaatcaaagtttgaataatatcctgatgggacataaagcggcctctctcaattctcgattcgtcgttttgtctgcaggcgagtataattcctcaagttaacttgaggtaaagcgctttatggaaaagaaatcaccccgcatcaaaatgctgttgacgcctggagaagtggcaaaacgaaccggcgtggcggtctcggccctccatttttatgagagtaaaggattgatccacagtcagcggaatgccggcaatcagcggcgctaccggcgtgacgttctgcgcgcggtggcgattatcaaaattgcgcaacgtattggcatcccgctggccactatcggcgacgcgtttggcgtgctgccggaagggcacaatctcagcgcaaaagagtggaagatgctgtcatcgcagtggcgtgaggagctggatcggcgcattcataccctgacggcgctacgcgaccagctcgacggctgtatcggctgcggctgtttatcgcgacgcgactgcccgctgcgcaacccgggcgataaactgggggaagagggaaccggcgcccggctgctggaagacgagtgataaaactaaagcgccacaactgggcgctttagttgttttccggtcttggtctttcgcattatctcgctggttcgcgagagggtttcccccgacgtcgacgtccctcagtattgcgcaatctgttgatggaggttccggtttgcgtcgacactttaactatggcatctgccgtcgctttttcctcactattttgctgaaattttcccggcaatgagcgcctgttcctatagttaatttgaacaaactacgggagaggctcatgctgacggtacatcatcttaatcaatcacgatcgcaacgcgtactgtgggcactggaagagctgcagctgccttatcagatagtccgctatcagcgggagaaaacgatgctggcgccggcggcgctgaaaaaaatccatccgttgggcaaatcaccggtactggaagataacggctatgtgctggcggagtccggggcgatcctcgagtatttgcaggaaacctgggacagcggcgggttgttgaagccgcagggaattgacgacaaactgcagtaccgcttctggctgcactatgccgaaggctcgctgatgccgctgctgttaatgaagctggtgttcgccagccttggcaaaccccctgtgccctttggcgttcgctcgctgggttcgctgctgggcaaggggatacagaaaacgtggctcgatccgcagctggccacccatgcgcggttcattgacgaccatcttgccgcgcggccatggttcgctggcgagcggctgagcatggccgatatccagatgagcttcccggtgatggcattgttggcgcgcggcggcatgcatgaccttgtccatatcgaggcctggcgtcagcgagtggaacagcgaccggcctggcaacgcgccatcgagcgcggcggccccttcaccttacccggcgcctgagatatcagcggatccgatgacgtcgataaatgaaagcaactcactaaaaaattgttagcggattgcgcatagacgataacgtttgcgcatcggctggtcattttctgttcgtcataagcgaaatttagcgaaatacgataaacatcggttgaaaagggttatctaaaggccggataatcgtttgcctttctgtttcgctcccccttttttctgctgtccgggggaggcgataaggttgaccaccgtagtgtatgcgcggagttaaacgtttgcttttttgcggcccccctggcgctgcgattcggtacatggagatcgcgtttaactggcagtggacggtccaccacgcatatcaacgaacgataaaaattttcaggggaagttttctatgtctacgccttcagcgcgtaccggcggttcattggacgcctggtttaaaatttcggcgcgcggcagcaccgtgcgtcaggagattgttgcaggtcttactacctttctggcgatggtgtactccgtcatcgtggtgccgggcatgctcggtaaagcgggcttcccgccggccgcggtgtttgtctcgacctgtctggtagcgggcgttggctcgctggcgatgggattatgggcgaatctgccgatggcgatcggttgcgctatctcgttgaccgccttcaccgccttcagcctggtgctggggcagcagatcagtattccggtagccctcggcgcagtattcctgatgggggtcctgtttacggtgatctcggcaaccggcatccgcagctggatcttgcgtaacctgccgcagggcgtggcgcacggtaccgggatcggcattggcctgttcctgctgctgatcgccgccaacggcgttggtctggtgatcaaaaacccgctggacggtttgccggtggcgttgggcaactttgacagtttcccggtggtgatgtcgctgattggcctcgcggtgatcattggtctggaaaaaatgaaggtgccgggcggcattctgctgaccattatcggcgtgtcgattgtcggcctgattttcgatcccaacgtccatttctccggcattttcgctatgccatccctgagcgatggccagggtaattccctgatcggcagcctggatatcgtcggcgcgctcaacccggtcgtgctgccaagcgtgctggcgctggtgatgacggcggtctttgacgccaccggtaccatccgcgcggtggctggccaggcgaacctgctggataaggacggacagatcatcaacggcggtaaagcgctgaccaccgactccctgagcagcgtcttctccggtttagtcggggcggcgccggcggcggtttatatcgaatcggcggcgggtaccgcggccggtggtaaaaccggtctgaccgcggtgacggtcggtgtcctgttcctgctgatcctgttcctctccccgctctcttatctggtgccggcctacgcgaccgcgccggcgctgatgtacgttggcctgctgatgctgagcaacgtggcgaaaatcgatttcaatgactttgttgacgcgatggctggcctgatcaccgcggtgtttatcgtgctgacctgtaacatcgtgacgggcatcatgatcggtttcgcgaccctggttattggccgtctggtctccggcgagtggcgcaaactgaacctcggcacggtgattatcgctgtggcgctggtggtgttctacgccggcggctgggcgatttaaacccttcgtgctcctcacgggcggctcaggccgcccgttttatttttaagccacatcctgtttccatttgcgttaatctgggtagcgtatgattcacaggcacgacgccttacaggtataaaagaaaacgcagcaaacagggaacacatggaaatattctttaccatcctcatcatgacccttgtggtctcactctccggggtagtgacgcgcgtactgccctttcaggttccacttccactgatgcaaatcgccattggcgcgcttctggcgtggccgacctttggtttgcacgttgaatttgatccagagctgtttctggtactgtttatcccgccgctgctattcgccgacggctggaaaacgccaacccgcgaatttattgaacacgggcgcgagatcctcggcctggcgctagcgctggtggtcgtgacggtggtcggcatcggctttctgatctactggattgtaccgggcattccgctgatcccggcgttcgcgctggcggccgtgctgtcgccgaccgacgccgtggcgctttcgggcatcgttggggaagggcggataccgaagaaaatcatgggcattctgcagggggaggcgctaatgaacgacgcctccggcctggtctcgctcaagtttgccgtcgcggtggcgatgggcaccatggtctttaccgttggcggcgccaccgtagaatttctgaaggtggcgattggcggcgtgctggccgggtttgtggtgagctggtcgtatggccgctcgatgcgcttcctcagccgctggggcggggatgaacccgccacgcagattgtcctgctgttcctgctgccgtttgcctcctatctgattgccgaacatatcggtgtctccggcatcctggcggcggtagcggcggggatgaccatcacccgttccggcgtgatgcgcaccgcgcccttggccatgcgcctgcgcgccaacagcacctgggcaatgttggagtttgtcttcaacggcatggtcttcctgttgttgggcctgcagctgccggatatcctctccagttcgctggtggcggcggaggccgaccccaacgttgagacctggatgctgtttaccgacattatcctgatctatgccgcgctgatgctggtgcgttttggctggctgtggtcgatgcgtaagctcagtcagcgcttcctgaagaagaagccgatggagtttggctcctggaccacgcgcgagctgctgatctcctccgttgccggggtgcgcggggcgattaccctcgccggtgtgctctccattcctctgctgctgccggacgggaatgtctttccggcgcgctatgagctgattttcctcgccgccggggtgatcctgttctcgctgttcgtcggggtgattgcgctgccgatcctgctacgtcacattgaatcgagcgataatgtgcagcagcggaaagaggagcgtctggcgcgcgcggcaacggctgacgtggcgattgtggcgatccagaagatggaagagcgtctggcggcggataccaaagagaatatcgatacccagctgctgaccgaagtcagttcgcgggtgatcggtaacctgcgccggcgcgccgatgggcgtaacgacgtggaaacctctatgctcgaagagagtctggaacgccgcttccgcctggcggcgctgcgctctgagcgcggcgagctgtatcatctgcgcgccacccggcagatcagtaacgagacgctgcagaagctgctccacgatctcgacctgctggaagcgctgttaatcgaagatcaataacctgtaatccggatagcgcgacgcttattcggactactggcgagactgcagtaaatgtgtagccccggtaagcgttagcgcgaccgggggaaacccgggcagcggcgcaagcgcctgacccgggctaccccttcccttgcggaacgcgttgtcaccagagaattattccagccagaacgctttgctgcacgtcagccaggcttcagcgctgcgcgacatatatacgccttcccgccaaatcatccccagctcccagcgcagctcgctttgcaacgggatccagcaaaaattctgccggtcgagacgctggcaaatcggttccggcaggatcgctacgccaatgcccgcctgcaccatggcggcgagaaaatcccactggccgctgcgcactgcgatacgtggcttcacgtcatgctcggcaaacagccgcatcagctgctggctaagggcaaattcctcgttgtagataaccagcggatgcgacgccagctcggccggcgagagcgaggttttaccttcccactccgcggttcttggcgtcaggacgcacagcgggtgattgaacaacggcaggatggtgaggctgctatcctcctcgacaggcagggcggtcatcgccatatcaagttcgccattgctgaccgcctgctggaccgtcaggccgccaaactcggcgatcttcagctcgacgcccggatagcgctggcggaagcgactgatcggctcggccatcagcatcccgaccatcggcggaatgccaagccgcagcacccctttatgcaggtggttgatatcgctcagctctgactccagctggctgaactcgcccaagatcgcctggccgcgttcaaagacgacgcgcccggtatcggtgagcagtagtttgcggccgtcgcggatcaacagcgtgcagtttagctcatcttcgagattcttgagcatcttgctgatggtgggctgtgtgacaaacagcttttccgccgcgcgagtaaaactctgctgacgaaccacttcaacgaaatagcgcagcgttcggatatccataattattccctgagactatacctgcgatgattttaattcatttctgtccgcttcggcggctctctatactgctcgcctgacttctttttttcaggactatcgcacatggccttcgcgccagctcgcgttgcccccgccgtggcgcaacgacttcagatcccggtacaggtacttctctacgtcgggttattcatcttcgcacaatatctggtgaacaggtggcaggtaccgctgccggctaacctggtcggcatggtgatgctcctgctgctgatcgtctgccgggtgataccggtaagctgggtgcgcgccggcgcccgctggctgctggcggagatgctgctgtttttcgtcccggcggtggtcgcggtggtgaactacgcccagctgttgatggtcgatggttggcggatttttctggtgattgccttaagcacgctgatggtgctcggcgccaccgcctgggtcgttgacaaggtctatcgttacgaagtgggcaggttaaaaaaatgagcgatgccgtgctgagtatcctgtgcctggtggcgacgctggtcctctattacgccaacaaaaaactgtatcgccgttttcataaactccctctgatgccgctggtgttcacgccgatcctgctggtgctgattctggtggtaggccacatctcttatcagagctatatgggagagacccactggctgctgtggctgctgggcccggcgaccatcgcctttgccgttccggtgtatgaaaatgtcgcggtgattaaacgccactggatgtcgctcagcgccggggtggtgacggcggtagtggtggctgtcaccagttccgtatggctggcgcgcgggtttatgttgtctgatgaaattcagcgtagcctggcggtgcgctcggtgaccacgccctttgcgctggcggcggcgaaaccgctcggcggtcaacccgatctggtggcgctgtttgtggtgatcaccggcgtgtttggcatggcggtgggagatatgctgtttttacgtcttgctatccgggaagggatggcgaaaggagccgggttcggcgcggcttcccatggtgcgggaacggcgcgctcgtatgagctgggccagcaggagggcgtggtggccagcctggtgatgatgctgtcaggcgtagtggtggtgctggctgcgccggtcgtgcgctggctgctgttttaacattatcgccagagtgaatgttaataaatattgaggagaggaatagctatcggctattccctgtttttgttattgatgcatttaacggttcatcataaaagattaagccaattcttatatcagcactgactttgtaactaaatgtttctctgcatgcccgtatttaattatggggcaaatattatataaatatccaattatctttgcgaattttataactttataactctttgatttttatggttttgagtatggacacgcatgcgttgcgatgctatgtcgcaaaaaatcaatttttacattaataattgagttcttacctcatgctagttattatttttacgcgagcttgtattattgaatggattcaaatgctggtcgtttatttatgaataatattaattgtcataaaccatatgtcatgtaaatacatgcatgacgccgcgctgcttgaatttcattctctaatatcgctgcataaagcaattgacggactgattgtcgtttataatggatatgggaataaatatgaagatgagtaaaaaatttctggcgggtgccctgattttctctgcctgcagcgcgctgtctaccgttgcgcaggctgataacaccattacctttaatggtattgtttccgataccacctgtacggcgaccattgatggcggtgtaacggctattgatatgggcaccacctcagtggcggatctgaaagcgtataccttcggcgctgccaagaacttctcctttagcttagctgattgcccgaccgcggaagaaggtggcaacagtatcgcccgcgtcacttttggcggtgtttccgataccgcgaacagcgattattttaaaaaccaggcaactgatgagccggcaaccggcgtcgctgtggcccttttcgacgaagcgggcaatgtgatgaagaataacgaagagggttctgatgttgatatctcttcgggtgcagcaaccattccgttcaccgttaaaatggtgaaatcgggtgatgccgatccgacgaaaggtaccgttcagacaaccgtgacttataacgtgacctatcattaattcggcttcttgttgaatggagaaaggggaatcgcctgctattccccttaaattaaacatatgagatatcctttttttgcgatcggtttattgctgtcttcttccttcgcgcaggccagcgtggtcgttggcggtacgcgtctggtttttgatggtacgaaaaataacgctgtaataacggttgagaataaagatcagaacagcaatatcgttcagtcctggctctcggtggttgatgcagcctcacccgccaaagacgcatttattattacgccgccgctgtttcgtctcaaagccggggagaaaggatttgtccgcgtagttcgatcaggaaagaaattacccgacgatcgcgagtcgatgttttggctcaatattaaagggatcccggcaacagaatatgtacctgataaaaatgtcgtacagtttgcgattaattcgaaaataaaattgatttatcgacccgctgcgttaaaaggtaatacaccggaagcgtacgctgaaaaattacagtgggggaaagaggggacgtcggtgacggtaaaaaataactcaccgctgtatatgaatttctcacaggttagccttaacggtaaaaatatttctggcgcatggtttgctgccccgttttccaccttaaaaatacccgtgcagagtagcctgtcggcgacaggaaaaaaagagatcacatggagcgtgattaatgattatggtatgtcagggaagaaatataccgctatcattcagtagcgttgagctgctattttcaactaaaagtatctgcgtcgctattattctgtgcctaagtactctaccctctcgcgcggaggccggcgaatatttcaacccaaatttactcgaagtcgctgagagtcctgcggcttcggttgatctatcctatttttcgcaagatggcataccgccgggcacctatcacctggatgtttacatcaacgataagtacgtcagttcagactcgctgacttttcaggaaattagccatgacgcaggcgcgactgcttctccctgcctgtccgcggagtatctgaattcatggttgattaataccaccgcctatccgcagttgttcgaggcaggggaaacctgcgcccggctgtcggcgatccccgggatgacgttctcggtatctcttgcccagcagcgcattgattttaccgtgccgcaggccgccatgctgaatcgccccagagactatattcccgagagccagtggcaacaggggatcaatgccggtcttctcaactatagcgtcaccgggcagcgtaatgcgccgcggcataacggcgccactatcgacagtcagttcgtcagcctgcagccagggctgaatctgggaccatggcgcctgcgcaactacagcacctatagccacagcgataacaacagccgctgggagtcggtttactcctatcttgcccgcgatattcacaccctacgcagccagctggtggtcggtaatacgtatacctcttccggcattttcgacagtttgagttttaccggtctgcagctcagttcggacaaagagatgctgccggatagcctgcatggctttgcgccgacgattcgagggatcgcgcgcaccaccgcggaggtctcggtttatcagaatggttacagcatttataaaaccaccgtcgctcccggcgcctttgaaattaacgatctgtacgccaccggcagcgccggcgacctgtacgtcaacattaaagagtctgacggcagcgagcaaaactttgtggtgcctttcgcgtcgctggcgatcctgcaacgtgagggccagctggactatgcgctgagcagcggcaggacgcgatcgggtagctccgacgataaagaatataactttattcagtcttccctggcctatggcgccaccagcaacatcactttttatactggtttccagcaggcggaagataaatacaccaacctgttgttaggcgctggctttaacctcggtactatcggtgcgctgtcgtttgatggctctcagtcgtgggccgacgtgaaaaccagcgatacggccttgtcaaccagtaaagagcaagggcaatcgtatcgcgtccgcttcagtaaaagctttctgcagacgggcaccagcttttccgtggccggttatcgctactccacctcgggatattattcgtttcaggactttgtcgataactcttccacacagcgcgactgctgtacgcagagcggcagaacgaaaggccggtttgacgcatcgttgtcgcagacgctgtttggctatggttcgctctcgctttcgttggtcaatgagacctactgggacagttcgcgtatggaatcggtgggcgtgggctatagcgggtcgattggcaaggcctcctactttattaactattcctataaccgcaatgtgcaaagcaccgatgacagcagcaataaccggccggccagcgatacggtcgtctccctgacgttaagtattccgcttggcgagacgctctcggcaaattacaccatgaaccatggtcggcataacgataccacgcacagcgtggggctcaacggctcggcgtttgaggatcgttccctgaactggagcgtactggaagggtacaacacgcaggataaaagcacctccggcaacctcagcgtcaactaccagggctcgaaaggggatgtggctggcggctatggctacgaccgctacagcaatcactacaactattcgctgcgcgggggcatggtcgcccatacgggcggactcacgctatcacgctttcttggcgagagttctgcgctggtcgaaacgcctggcgtcagcgatgtgacagtgcgcggtcagacaaacgtgacgacggatgccgccggatatgcggtggtgccttacgtccgtccgtaccatcgtaacagcctggcgctggatgaacaggaaatacctggcgctgaagtggataacgtcgccagaacggtggttccgacgcgcaatgcgatcgtcaaagtgaagtacgacacgcgaattggctataaggcgatgctcaccctgcgtacccgcaatggcgtggtgcctttcggcgcgctggtgaccctcgataatgatcacggtagcgcgtcgcgcagcaatatcgttggcgatgaggggcaggtgtatctaacggggctgcagaaaaaaggccagctgttagcgcgctggggggagaaaagcagtgagcagtgcaccgttcattatgacttctccggcatggcccttggcgacgatattctgttctatcaggccgaatgtcggtaatggatgcaggttttcaacatggaagaggggctgatatgaatatgcgagacggcagcacaaggggcctcctggtggccattttgctgctctcccttccggcgctggcttatgagggcagcagcacggtcaattttaacgtcacgggcaccatcgaagcgccttcctgtgaggtggccgtggagccgtcgaacagtatcgatttaggcaccgtctcctcgcagacgttctccggacatgccggggcgagcggcgccagcgtgccggttaagctggtcttttccagctgttccgccgatgcgtcggcggtgaccatcgcgtttagcggcaccagcttcgatagcacccacgcttcaatctataaaaacttccagactggcagcaacggtgccagcggcgtcggtttgcagctgcagagcatggccgaccagcagccccttggccccggcgaccagtatctctatacctttggggacgatgcggatatccatacctttaatatggtggcacgtatgttttcgccttatggccaggtaaggtccgggatggtcgggtttaccgccacgttcgatgtggcttacaaataacgtttcgacagggatgggtatgaaaaaactgatcttattgctcatattggcactgtgtcccgtctatagctgggcggcctgcacgggaaccaactatggcgatgtctcgatgaccaacctgccggaaaagatcctggtcaatgccgggagctataccgcagggacggtactgtatgactcggggaagattacgcgctcgcaaacggaattgcttaactgtgaggggagcacctacgcggtttttgcctggtcctcgaacaatgccggggcactgataggggataatatctatgccacctcggtgcaggggatcggtatccgcgtcaaggtgtggctcaatatcagcggtgaatatggcgatgacaccgatgatttcagccccgactcgcaggtgcattatattggtgatgtgaattattacctcggaaagccgacaggtcttttcgactctttcgcgtcgactcattataccccggcgtatcagctgcagctggtggccaccggcggcgccatcgccagcaagagtcaattatcgttcagcgacccggtggccacggtatcggccaaggataaaaaggggaccatcgctatttcacaactgcacatcagcggcaccaccagcatccagctaatcccgatggggtgtattgtcggtagcaataatctcagtttttccatgggcagcatcaatgccagtgagtttaataccgcgacgaaggtgggtagcgcgcggcagtctctgagcctctcctgcgagccgggaactaacgtttcgatgcgtgtggtggctgcttctgcaagcggggataaccctgacaatacggtgatggccctcgcggcggaacagaatgccgccactggcgtgggagtgcagttaaatttgaatggcaaagcactgccgttaaataccgatatcagcctctatacttcgagccgcgcgacggtgaccaacagcggcgcggatgccagctacagctatttcaccaaccccgacagccccggaggcgcagcggccatgcagacgctcgccttatccactaactattacaggacggggagcgcggtgaccgcggggacagccaacgccaccggggtgatcacctttacttataactgagggggagaatcccttccccgaacgatgccggggaagggagaggacaattaatgcgcctggccgcgttcgataccgatcccggtttgtgaacggataaactgggcgcggaactgctcgcgctcgcgcatcccttccggtgagttatcggtggcggagaagacccagatgccaatgaacgcgatggcaatggagaacagcgccggatattcatacgggaacagcgctttctcatggccgaggatctgcacccaaatggtggggccgaggatcatcagaatgaccgcagtcagcaggcccagccagcctccgaccatcgcgccgcgggtggtcagcttcgaccagtacatcgacagcagtataatcgggaagttacagctggcggcgatggagaaggccaggccgaccatgaaagcaatattctgattttcaaacagaatacccagcagaatggccaccaccccaaggatcagcacggtgatcttggagaccttcagctcctgacgctcggtcgcgcccttgcggaagacgttggcgtacaggtcgtgcgacaccgctgacgcgccggcgagggtcaggcccgccaccaccgccaggatagtggcgaaggctaccgcagagataaagccgaggaacaggttgccgccaaccgcatccgccaggtgcaccgccgccatgttattgccgccgataagctgtccggccgcgtctttaaacgccgggttcgcgccgaccagcatgatggcgccgaagccgatgataaaggtcaggatatagaaatagcccataaaaccggtggcgtagaagacgcttttacgcgcttctttggcgtcgctcacggtaaagaagcgcatcagaatatgcggcaggccagcggtaccgaacatcagacccagacccagagagagcgcggatatcggatctttcaccagtccgccgggactcataatcgccgcccctttcgggtggaccgccatcgcctcggtaaacaggttattgaagctgaagccgacgtgcttcatgaccataaaggccataaagctggcgccgcacagcagcagaaccgctttaataatctgcacccaggtagtcgccagcatgccgccgaacaggacatagagcaccatcagcacgccaaccagcactacggcgacatggtaattaaggccgaacagcagctggattagcttgccggcgcccaccatctgggcaatcagatacagggccaccaccaccagcgaaccgcaggcggagagggtgcggatcggcccctgcttcaggcggtaagaggcgacatcggcaaaagtatagcggccaagattgcgcagacgttcagcaattagaaacaggataatcggccagccgacgagaaagcccagcgagtagatcagcccatcgtagccggaggtatacaccagcgcggagataccgaggaacgacgccgctgacataaagtcgccggcaatcgccagcccgttctggaagccggtaatattgccgccggcggtgtagtaatcgctgcgcgaacgcacccgttttgaggcccagtaggtgatgtacagcgttagggcgacgaaaatcaggaacatgacaatcgcctgccagttggtcggctggcgctgtaccgcgccggtaatagcgtctgcggcgtgagcgccgaggggcagcagcgtggcggcgagcgccgtcaggactctcttgatcatgcttttacctcgttgagaacgcttttggtcaaacggtcgaattcaccgttagctcgccagacataaataccggtcaggataaacgaaatgacgatcacgccaatgccgagcgggatcccgcgggtgacgctggttccggcgtgcagcggggtgccgagccagccgggtgcaaaggcgataagcaaaataaagcccacatagatcactaacataatcactgacagaatggcggcaaaccgttgccgtgatgcaactaactccctgaaatgcgcactattttctatccgctgacaaagttgttcattcatcttagcgtctccagaggtctccctttcgtcatccactcggcggacgctggcgacagcaacccctccggcgacggagccgggacaggtgttgctgacggcgttcctgcgagtgaaatcctgggggagggacttatttttatcctctccccggaaggggagagggtgtagggaatcggtccttacttacgatggcatggtaatggcctgcttctcttcgagcagtttttccacgacgccaggatcggcgagggtcgaggtatcgccgaggttgctggtgtcgcctgcggcaatcttacgcagaatgcggcgcatgattttgcccgagcgggttttcggcagcgaatcggtccagtgcagcacatccggcgtcgccagcggaccgatctctttgcgtacccagttacgcacttcggcatacagctccggcgtcggttcttcgccgtgattgagcgtcacgtaggcatagatggcctggcctttgatgttatgcgggatccccaccaccgccgcttcggcgatttttgggtgtgagaccagcgccgattcgatctcggcggtccccagacggtgtccggagacgttcaggacgtcatccacccggccggtgatccagtaatagccatcttcatcacgacgcgcgccgtcgccgctaaagtacatatttttgaaagtggagaagtaggtttgctcaaagcgctcatggtcgccgaacagggtacgcgcctggccgggccaggagtcggcgatggcgaggttgccctcggtggcgccatccagcggcaggccttcgttatccaccagcaccggctggacgccgaagaacggacgcgtcgcggagccggccttcagctcaatcgcgcccggcagcggagtgatcataaagccgccggtttcggtctgccaccaggtgtccatcaccgggcacttctcgttaccgatcttcttccagtaccactcccaggcttccgggttaatcggttcgccgaccgagccaagaatgcgcagcgaggagcggtctgtgccttcgatagctttgtcgccttccgccatcagggcgcgaatagccgtcggggcggtatagagaatgctgaccttatgcttatcgacgacctggcacatgcgcgccggcgtaggccagttcggcaccccttcgaacatcagggtggtggcgccgcaggccagtgggccgtacagcagatagctatggccggtgacccagcccacgtcggcggtgcaccaataaatatcgcccggatggtagtcgaaaacgtatttaaaggtggtggccgcatagaccagatagccgccggtggtgtgcagcacccctttcggtttaccggtggagccggaggtatagaggatgaacagcggatcttcggcgttcatttcgacgggccggtgttcggcgctggcgttcgcaatcaggtcgctccaccacagatcgcggccttcctgccagtcgatattgccgccggtgcgtttcaggaccaccacgtgctcaatgcttttcacgttcgggtttttcagcgcgtcatcgacgtttttcttcagcgggatggcgcgaccggcacgcagcccttcgtcagcggtgatcaccaggcgtgagctggagtcgataatgcgtccggccaccgcctccggcgagaagccgccgaaaatgaccgagtggattgccccgatgcgggcgcaggccagcatcgccaccgcggcttccggcaccatcggcatatagatagcaaccacgtcgccttttttaatcccgaggtcgagcagcacattggcgaaacggcacacgtcggcatgcagttcacggtaggtgatgtgcttgctttggctggcgtcgtcgccttcccagatgatggcggtttgatcgccgcgttcggcgaggtggcggtcgagacagttagcggcgaggttcagggtgccatcttcataccatttgatggaaatattacccggtgcgaaggaggtgttctttacacgggtatagggccgcatccagtcaaggatcttgccctgctcgccccaaaatgtatcagggtcggttatggattgttggtactgcgccttgtactgatccgggttaatcaggcaacgttccgcaatattagcgggaatagggtgtttgtgaatttggctcatggctttttttctcctttgaacttgttaaatatatgtcaaacaaacgttaagagtaggggttttgacagctttgtttgttaattggggggcagatcacgcaatgattaaactgggtgaaatttcatcaaatgaaactttgaagcgaaataattacgcaaatgaatttatagaaacggaagctgtgaaaatttttttattacaaatacttatgcaatataactgggggaaattcgctgctttatgcataaaagcagaggaaagccctgttcttaaaggcttgcgcagcatgccgtgcaaatgatactgatattgcgcgttaaataaccccacaaagcaacgcaacacaattcataccccctgcagtgggtaccatgacgaaaaggaatggtgcctttcattgaggaagtcagtagtgaagaaaacaaaaaaagtcagtctggcctggcaaattttgctagccctggtgctgggtatccttctgggcagttatctgcattaccacgctgaaagtcgcgattggttaattagcaatttgctgacgccggcgggcgatatctttatccatctgattaaaatgatcgtggtcccgattgtcatttcgaccctggtggtcgggattgccggcgtgggtgacgccaaacagttagggcggatcggtgccaaaaccattatctatttcgaagtgatcaccacggtggcgattgtgctgggtatcaccctggccaacgtcttccagccggggacgggcattgatatgtcgcagctggcggcagttgatatttcgaaatatcagaacaccaccgccgaagtgcagagccatgcgcacggcctgatgggcaccatcctgtcgctggtgccgaccaatatcgtggcatcgatggcgaaaggcgatatgctgccgattatcttcttctcggtgctgtttggcctggggctctcctcgctgccggcgacccaccgtgagccgctggtgacggtcttccgctctatctccgagaccatgtttaaagtcacccatatggtgatgcgctatgcgccggtcggggtattcgccctgatttcggtaaccgtcgccaccttcggtttcgcctcgctgtggccgctggccaagctagtgttgctggtttactttgcgatcctgttcttcgcgctggtggtgctggggattgtcgcgcgcctgtgtggtctgagcatctggatcctgatccgcatcctgaaagatgagctgattctggcttattctaccgccagctcggagagcgtactgccgcgcattattgagaagatggaagcctacggcgcgccggcgtcgatcaccagctttgtggtgccgaccggttactccttcaacctcgatggttcaacgctgtatcagagcatcgcggcgatctttatcgcccagctgtacggtattgacctctctatctggcaggagattaccctggtgctgaccctgatggtgacctcgaaagggatcgccggcgtgccgggcgtctccttcgtggtgctgctggccaccctgggtagcgtcgggatcccgctggaagggcttgcctttattgccggcgtcgaccgtatcctcgacatggcgcgtaccgcgctaaacgtggtgggtaatgcgctggcggtgctggttatcgccaagtgggagcataagttcgatcgcaaaaaagcgctggcctatgaacgcgaagtgctgggtaagtttgataaaaccgcccaataaaacacaaagcccggcgcgatagcgccgggctttttcttatcctttactaatccggtcaaactcttcgcagccggtatcaaacccctccaggcaactgacgttgagccagtgcagcgccttctgcttattcggttcgataaagcctttttctccctgctggaacatcatcccggcccagtattcggcatagccggtgcgggaaagtgatgaactgcctttgaagtattcacttgctttcacatcatcctccgggccgtgtacgccgctggcgtagatcagccccagcagcatctgggcatctaccgccgcatcgctttcgctatcccgggcagcatcctgcagcagcgtgatggcgtgcgctacgtcggtggcgccagcctgacggttgaccagcacccgcgcgaggacgatctctccggatttactgccggcctcgacggctttttccgccagctggcgggcctgcggatagtccgcctgttgggggttacggattttgagctgcgccagcagcgccagcgcatcgccatcgccctgggcggccgccttctgcgcccagtattcggctttttgataatcgccggagctgacccaggtatcggcaaggtaatattgcgcgcgtcgatcgccggcttcggcctgctgttgatactgactgccaggttcggtggccaccgctgcgccgctggtgaaaaccagtagaaataaaaagaggtatttcatttgtatttattatcagtaaggaacatagcgcgcagtataaagggaggcgaaaaagaagaaaatggcgggtatcggtaggtaaggccgatttgcgctacctgaccgtaggcccgcgcaagcgcagcgccgccgggcgacagactgcggacacggagccgcttgtgtgccgggtggcggctgcgcctgacccggcctacgcatcgcgcgagccgggtcagaccgccgaaccttaacccatcgcgctttcgcgcaggcgggatttcagcttgttgtactcgtcgatcacgtactgttccgcggcgcgctgatcggcaatccgctcaacgttgaccgcgcagtacttgtactccggcgttttggttatcggactcaggttctctgagaccagttcgttacaggcgccgatccaccactggtaggtcatgtacaccgcgcctttattcggccgatcgctgacctgcgcgcgggtgatgatgcgccccttacgcgaattgacccataccagctcttcatcttcaatgcctagccgttcggcgtcggcggtgttgatttgcgcatagcctggttcatccgccagcgccgccagcgccgcgcagttaccggtcattgaacggcacgagtaatggccgacctcgcgcaccgtcgacaataccatcgggtactcgtcggtaagcttatcgatcggcgcgacccagtcgcaggtgaagaactgcgccagtccgttcggggtatcgaacttctctttaaacagatacgacgttccctgatcggcgtcggactcatcgcggcacggccacatgacatagccgagctcacccattttctcgtaggtggcgccgtagaagtccgggcacagatgccgcaactcgtcccagatctcctgggtgttattgtaatgcatcggatagcccatccgggtggcgatttcgctgatgatctgccagtcggttttcaggtcccacttcggctccaccgctttaaagaagcgctggaagccgcggtccgctgcggtatacacgccttcgtgctcgccccacgaggtggacggcaggatgacgtcggccgcggaggcggttttggtcatgaaaatgtcttggacgataaccagttccagatcgtcgaacgctttgcggaccgccgagagttcggcgtcggtctgcagcggatcctcacccataatgtacgccgcccgcacttcaccgtgcgccgcgcggtgcggcaattcgctgatgcgatagccggtatgcgcaggcaggctttccacgccccaggctttggcgaatttctcgcggttctccgggaacttgacgtactgatagcccggataggtatccggtagcgcacccatatcgcaggcgccctgaacgttgttctggccgcgtaccgggttgacgccgacgctcggcttgccgaggttgccggtgaggatcgcgaggctggtcagcgaccgcaccgtctccacgccctggtagaactgggtgacgcccatgccccacaggatggcggcggatttggcgctggcatacatccgggcgcaggcgcggatctcctgggcgctgaccccggtgatctcctccaccgactccggcgtatagccttcaacgattttgcgatactcctcgaagccttcggaacggctggcgacgaaggatttatcgtacagatcctcttcaataatcacgtggccaatggcgttgagcagcgcgatgttcgagccgttcttcagcgcaatgtgcatatcggcgatgcgcgcggtttcaattttgcgcgggtcgcagacgataattttcgccccgttgcgtttagcgttaatgacgtgattcgccacgatagggtgggaatccgccgggttgtaaccgaagataaacaccagatcggtgtcatcaatctccgtgatggcattactcatggcgccgttaccgaccgactggtgcagacctgcaaccgaagggccgtgtcagacgcgagcgcagcagtcgacgttattggtaccaataacggcgcgcgcgaatttttgcatcacatagttggtttcattaccggtgccgcgggaggagccggtggtttggatcgcatccgggccatatttggctttaatggcgctgaggcgggtggcgacgtaatccagcgcctcgtcccaggagacggcttccagcttgccgccgcgttgacggcggatcatgggggttttcaggcgcggcgttaggatctgggtatcgttaatgaagtcccagccataatagcccttcaggcacagggttccctggttggttttcccctgcgccgcttcagcccgaacgattttgccgttatcgaccaccaggttgattttgcaacctgatgcgcaatacgggcaaaccgtgacgacttttttcatcggtcttgctccagttattcaatgggcgcgtttgcgctatcgcgccgtcactatgcatcttctatgccatattttcattgtgggtattccttgatgatacgcgggttttttgggcggaatgctgacgaaaaacagcctgtcgacagatttgacgtgtcgataccctggagatgtgacggcgcttgaaaaaatgtcaccgggagaggaatttgtcggcgcaggcttgcagaatcgatcagactgacactaattcccggcgggcagaggcaaaaatgaaaccagtcattttagtggtggatgatgacagggcgatgggcgagctgctcagcgatgtgctcggcgcgcacgcgtttgaagtgcttgtcagccagaccggcaacgacgcgctgacgacggtggcgcagcgggcggatatcgcgctggtcttactggatatgatcctgccggatacccatggcctgcaggtgctccagcagctgcagcgcacgcggcctgagctgccggtggtgatgctctccggtctgggcagtgagtctgatgtggtggtgggtctggagatgggcgccgatgattacatcgccaaaccgttcagctcgcgggtggtggtcgcccgggtgaaagcggtactgcgacgcagcggggcgctggccggcgaggcgtcgggcgccggtgctggcctgacgtttaacggctggcggctggataccacgcgctgtgaactgtataacccgcagcagcaggcgatcccgctgacccagggagaatatggcctgctgctggcgctggcgcagaacgcgcgccgggtattgaatcgcgaacagctgctggcgctgactcataatgaaagcaccgaggtattcgaccggaccatcgatgtgctgatcatgcgcctgcggcgcaaaattgagctcaacccgcatcagccgacgttgattaaaaccctgcgcggtctgggctatgtcttttccgccgacgtgacccacagcgagaaggcggcgtagggcgggtttgctgccaacccgctgttgactttatttggcgcagggagtttactttttttattaaagtgacactctgggttaatctatggcaacaaaattaaactggctgctgcaaaacagcgctcccggagatgtgatccttcagtcctggttaagccagcatgccatctctccctctctggcctttaaatacgcgcaaagtggctggttaaaaaaaagaggcaacggcgtatatgcgcgtgcgggacgtgagccggagtggaacgatgcattagcatgtttgcaaaatcagcttgccgctccggtgtatgttgcggggctcagtagcttagtctggcagggccgttcacactatctacagctaaaacaaaaccagtgctggcttagtgtggaaaataaagcgctgctgccgaaatggttcagggaattcccgggtgtggagtggatagtcatatcggggaaaaaactgccggtgctggatgatagataccgtgtaacgcttgatataaaagggaaaaaactcatcggcagtgcgccagaactggctgcttacgagttgctgagcgcggtgccggggaccctctcatttaaccacgctgcagagcttttccaggggctggttaatcttaatcctcgtaaagtagagtatcttctttccgtcagccagtccgtgcaggccaagcgtttgtatctcttcttcgccagtttttacgagcatggctggctcaaacgaatcgatagccaaaaaatcgatctgggagcgggcaagcggcaaatcgtggaaaatggaaagttcaatgctcaataccaaatcacagtgcctgaacgctttcaaaaggaataaaaaatatggatatacaggcgccttattatcggtaggttgctctgctaatgcaggttttaccctatgttgctgtcgaacgggaatttgcgctgaaaggtggcactgccatcaatctctttatccgcgatttccctcgattatcggtggatatcgacctcgcctgggtgcccctggaaagcagagccatcgctttacctcatatacgggatgcgcttgcacgtattgccgccaatctgcaacaacaggcaggtatgagcgctgtattacaagctaatcgttcagatgagatgcgtgtcattgttactaccgatagcgcgcaaataaagatagaggtttcaccggtcgcccggggaacattatatccaccacaggagcgagaagtggtgggggcggtagaggacgtttttggctatgccagccttccagtggtttcgttgcctgacctctacggtggaaaattatgcgcggcgctggatcgccagcatcccagagatttttatgacgtgaaattacttcttgatgcgcaggagcttgaccgtcccattttcaatgggtttatcgtgtatttactgagccataatcggcctctggctgaagtgctgaatcctcgctggaaagatattgctgaacctttttaccgtgaattcagcgggatgacatttgagacgatagccctggaggaactgacagcagtccccaacaggatgattgctgcgttaaaatcctgtatcacacaacaggatgtcgattttttactgtcatttaaacgaggcgaaccagactggcgtttagcgccggaaatgcgtattcaggatttgcctgccgtgcagtggaaattgcgcaatattcatcagatgccagcgataaaacgcgctgagtcattagataaactggaaaaggtgctggccgagtggcgcagttagttacctggcccgcccttgttgaactcagcgtaaaacaggcgtgatttgaataaaccgtatcccttttctcgccatgacacgccgttctcctgtggcatcgccctgatagcgggatctactcgatctaaccattctgcaattgtataaacgcctgcagctcagggagcgttttggcgccgtcgatcgcattggcggcctgcaggctggcgcgggcgcaagcgtgagccagctgcagactggcggttaacggccagcgttcgtgactgccatacagcagaccggcgcagaaggcgtcccccgcgccgacgctgccgataatctcctccggcggtagccgccatgacggtacccagcgcccggcttcggtacgggagacgccccatgccccctccggacaatggatcactacccgctggcgtacgccggcgtcaagcaatgcgctggcggcgcgggcgatattggcgacgtgcggctcgccgttgggtagacgaatctccagcccgctaaactcgctggcttccagttcattgatggtcaggtagtcaagatgcttcagcgccggcaggaccagcggccggtagcgcgggtcgcccttgcgcgacaccagatcgagggacacctcatagcctcgctcgcgcatctgcgccagcagtcgcgcgctgcgggtgccgtacacttcatcggggcgatcgaggctttcgagcagcagcagatagccgagatggaaaattttcagcggcgcatccagcggctcaaaagccgggagatcaagcaggcggttggcgccgggagagtgaaagaaagtgcgctggccttcggcgtcggtcatcacctgggtcatcgaggtgggggcggagctggtgcgctgtacgagctggcgattgatatggtactgatcgagcatggcggtgatgtagtcgccatcgttatcctcgccaatcaggccgaccgcctgcagcggcagcccggcgtgcattttggccagggtcagcaggacattcagcggcgcgccgccggtggcgcgttcgctatggacaatctccaccagccagccgcgctccggccactgcctgatctggtggacatgatcgaccagcatgttgcctgcggcaataatgcctttccgttccatgatcgctactccgcgccgtcatattcgttaagcgtagcgcacaatcggcggaacgattgtgcgcctggttgcgcttatttcacggtccagcctttgtaagagctgacgttatttttgtcgatcatcgtcaccgggatcagtaccggcgcggtcggcgcaggtttgccctgcaggatgtcgtagccaatctccaccgccttcgccgccatcacctgtgggtcctgcgctggggtggcgacgaacagcgagttcttacgcttcagcgcctcttcgccgtccgggctgccgtcgacgccgacgatgaagaactcgctgcgctgcgcctgtttcgctgccagatcggcaccaatcgccgtcggatcgttgatcgcgaacacgccgtcaatcttcggattggccgccagcagggaggtcatcacctccaggccgccttcccggctgcctttggcgttctggttggcggagaggattttaatgtccgggtgttttttgaactccgtttcgcagccttcgacgcggttttgtacggcggagaccggcggcccgttgatgatcaccacgttgcctttgttgttcaggcggtcgctaatgtatttacaggccagctcgcccgcctgggtgttatcggaggtgatggtggcgtcggccccttcggcggcgacgtcaaccgccaccaccacgatcccggcctctttggcccgcttcaccgccgggccaatgcctttcgaatcggcggcgttgaggatgatcatatcgactttggcggcgataaagttatcgatctgcgccacctgctggcccagatcgtagccgctggagaccagcgtcactttgacgttatcccccgccagcttgcgggcctccagctccgcccctttggtgatctgtacaaagaacgggttggcaaggtcgcccaccgtcacgccaatcgctttcagctctttggccgacgcaaaaggggaggcggccagcagcgcgccagcacacagcgcggtgactatcggttttaaacgcattcgcttttcctcgcaggtaagatgttgttgttatgcactttgatgatgccgggtacggtatttgtcgatcagcaccgcaatgatgatcaccgcccctttgatcaccagttgccagaagtaggagacccccatcagggtcatgccgttattgagggtggcgataattagcgcccccaccagtgtaccggtgatggtgccgataccgccgacgaagctggtgccgccgagaatgaccgcggcgatggcgtccagctcgtagccgacgccgaggttgccgttggcgctgtacagccgcgaagcgctcatcaccccgccaaggccggagagcaggccgctcatgccatagacaaacagcagcaccagccagactttgatgccggtcagccgcgccgcctgcatgttgccgcccaccgcgtagatatgcaccccaagggtggtgcggcgcaggataaaccagcacaccgcgatcaccgccagggcgatgactaccagccagggcactgggccgaggtagtcattgccgatccactcgaagctgatatcggagttgatcaccgtggtgccgtcggccagcagataggcggcgccgcgcagcgccgtgtaggtgccgagggtgacgataaacggcggtagcccggcgaaggcgaccagcgcgccgttgaacaggccgagcagcaggccgagcatcagcgccgccggaatcgacagcaacgcaaacgccgggatcagcgacaccaccatcgcggccactgcggtggtgccaaggatggagccgacggaaaggtcaatgccgccggtgaggatgatgaaggtcattcccgccgccagcacaatgttgatcgaggcctggcgggtgatattcagcagattgctttccgtgaaaaagttgggggcgataaagccgaaaacggcgacgatcaggatgaggatcggcagaatgccgacggtctgcatcaggtcgcccatcaacatttttttcgccgaagcggatttcgcgaccggcgcggaggtctctttcggtatgctcatagttgccctgccttaaggtgagaatcggtcacgccggtggccagcgtcatgatactttcctggctaatatcaccggcctgtagctcgccggcgataacgccctcgcgcatcacatagacccggtcgctcatgcccaccacttcgggcagctcgctggagatcatcagaatggcgacgccctggcgcgccatgtcgttcatgatgcggtaaatttcgcttttcgcgccgacgtcgacgccgcgggtgggttcatcgaggattagaatgcgcgggccaatcgccacccagcgcgaaattaacagcttctgctggttgccgccggacagtccgccggcgcgcacctgggcgtgcggcacgcggatgttaagcaactggatggcgtcatcggagatggtttgcgccttccggcggttgagcatcccccaggtcgcgtcgcgctccagcgtcgccatggtgatgttttcctgggctgccagttcgagaaacaacccctgttctttgcggttttcggtcagaaagccgatcccgaggtcgatggcttcccgcggcgagtggatcaccaccggctcgccgtcgatctcaatcaccccggcggtggctttgcgcaccccgaagatcagctgcgccagttcggaacgcccggcgccgaccagcccggcgaggccgacgatttcgccggcatgcaccaccaggctgctgggcttaatcttgccgccatcggtcagatcctcgacccgcaggcgcggctggccgcggggaatgtcacgttctttattgaacagatcgctgagcgggcggccgaccatcatgcgcaccagctccggcgcgttgagcttgtcgcgcaccaggctgccgacatactgcccatcgcgcaggacgctgacccggtcggagagctcatacacttccgccatgcggtggctgatatagatgatcgccatcccctcatcgcgcaggcgcaggatgagctcgaacaggcgctgggtttcccgcgaggagagggcggcggtgggttcatccatcaccagaatgcggctttgacggtgcagggcgcgggcgatctccacctgctgttgttcggcgatggtcagggtcatcacccggtcgctggctttgaactgggcgccgagacggtcgatcaccgcctgcgcctggctgagcatggctttgcgctgcaccagaccaccgcgcgccagctcgctgccgaggaaaatgttttccgcgacggtcaggttcggcgccagctgcatctcctggtagatcaatgtgatcccggcggccagcgcgtccttggggccgcggatggtttgcggttttccgtcgatcaggatctcgccgctggtggcggtataggcgccggcgaggatcttcatcagcgtgctttttccggcgccgttctcccccatcagggcatggatctcgccgggccagaccgtcaggtcgacgcccttcagcgcgtagaatttgccaaaagctttggcgatatggcgcatttccagtaccggggtggcggtcatcgcggcgctcctgtctgtaagaacaatagctgcagtccaccaccggaaaataaatgcagaatgtcagaatccattcatatttgtcatagtgataaatagttaaccgcgatcacagttacgcggcgtcattttctgcaccgtcacgcttatctgccgaccgatccttcaccggagttgttatgaccgctcgccgacacccgtttttcaccagcgcccgtggccgcctgctctcctttaatctgctgatgggcgtggtcaccctgttggtcagcggcgtggcggtgttcggctttcaccacgccagccagctgcaggagcaggtgcagcgccagactctcaacgacatgcgcggcagtatggatctggcgcgggacacggcgaatgtcgccacggcggcggtgcgcctgtcgcaggtggtgggggctctggagtacaaaagcgaagcggaacggctgctggcgacgcagcaggcgctgaagcactcgctggcccagctggcggcggccccgctggcgcagcaggagcaggcgcgggtggccaatattattcgccgcagcaacgcgctgcagcagagcgtggcggagatgctggagcgcggccagcgccgccatctgcagcgcaatgcgctgctgagttcgctttaccagaatcagagtaacctgcgccatctcgccgatcttaacgatcgcggcggggataaggcgatcgatccgcgccggctggccgagatggaccggctgatcgtggctgcgatccataccgtcacgccgcggtcgatcgtcctgcaactcgaccagctgcgcggcgccctgccgacacgcagcgccgatcccgcgctggcgtttgtcctccctgatgtgacccgcgagctggcgacgctggccccgctgtcggcccagctggaggagagcgacctgacgatcagctggtacatgtatcacatcaaagcgctggtcgcgttgcttaacgaagatatcaatcagtacgtgacccgggtggcggaagcctcagagcagcgggcggcgcagagccatcgggagctgcgctccatcagtatgtttattctgctttccgcgctgctggcgctggcgatcaccggctgcgccgggtggtacatctaccgtaatctcggctcgaacctgaccgccatctcgcgggcgatgtcgcggctggctcagggagagccgaacgtctcggtgccggccctgcagcggcgcgacgagctgggggagctggcgcgggcctttaacgttttcgcccgtaatatggcgtcgctggagcacaccacccggctgctgaaagagaagaccaaccagatggagatcgatcggattaagcgccaggagctggaggaggcgctgctgcatagtcagaagatgaaggccgtcggacagctgaccggaggtctggcgcatgactttaacaacctgctggcggtgattatcggcagccttgagctggtggagccggatgcgcgcgatgcgccgcgcctctccagggcgctgaaggcggcggagcgtggggcgcttctgacccagcggctgctggccttttcgcgcaagcaggcgctgcatccccaggcggtggcgatggcgccgctactggagaacctcagcgagctgatgcgtcattccctgccggcgaccttaagcctggagattgaggcgcagtcgccggcgtggccggcatggatagacgttggccagctggaaaatgccctgatcaatctggtgatgaacgcccgcgacgccatggcggggcgcgacggggtcatcaaaatacgcacctggaatcagcgggtcacccgcagcagcggccagcggcaggatatggtggccctggaggtgatcgatcatggcagcgggatgtcgcaggcggtgaaagcccgggtgtttgaaccgttcttcaccaccaaagccaccggcagcggcagcggcctggggctgtcgatggtgtatggctttgtgcgccagtctggcggccgggtggcgctggagagcgcgccggggcaggggacgacggtgcggctgcagctgccgcgagcgttgaccgaggttgagaaggaggtggcgccagcggtggacgagccgcccccggcgggcgagcggctggcgctggtgctggaagatgaagaggatgtccgccagacgctatgtgaacagctgcatcagctgggctggctgacgctggaaaccgccagcggtgaagaggcgctgcagctgctggaggcctcgccggatattgccctgttgattagcgatctgatgctgcccggcgccctgagcggcgccgatgtgatccataccgcccgacgccgctttccggcgctgccggtgctactgatcagcggccaggatttgcgtccggcgcagaacccggccctgccggaggttgagtggctgcgtaagccgtttacccgcgcccagctggcgcaggcgctgagcgcggcgtacgcgaggatttgagattcctccgctacccgggtttcatgcggatgattaaggtagcggcaggactctgatgagattggccccgatgaaacgttacgcaaccgcactgctcttttgcactctgtcgctgaccagcctggccgctcgcgccgatattatcgatgacgcgatcggcaatattcagcaagccattaacgacgcctataacccgggcagcagtcgctccgatgacgacgacagatacgatgacgatggccggtatgatgacgggcgctatcaggggagccgtcagcagagccgtgacagtcagcgccagtatgacgagcggcaacgccagctggacgagcgccgccgccagctggatgaacgccagcgtcagctcgaccgcgatcgtcgtcagttagaaagcgaccagcgtcggctggatgatagctactgatcgccccccgcaggccagcgtttaatccagcgctatttccatcccgtcatagcccgcttcgaaacctgtcggcagcgggttatccatcatccagacgtcaaactggtggctgatatgggtgaggatcacccgcggacagccaatgacctggttaaggctgcggacggtgtttagatcgttatggttacgcggggtctgcgcgcgcggctcatgactgcagtcgatgatcatcgcctgcgggcggttattgagcaaaaacttcagcgtcttgtccggcagcccggcggtatccgagagccaggccagccggctgtgggccgactccagcagataaccaaaggtcagcttcgagtgattaaggggtaggggcgtcacccgcagcccctgcaggttaaacatcacaaacggcgtgacggtatggctaaagtcaagcagaccggggtgtttgagcagatcgtcgcagccggcgtcatccggcgggccatagaccggaatcgacgcgccgactccccagcgcagcggaaacagcccctgcacatgatccagatggtagtgggtcagcagcacctgttgaaagctgccggcgggatgatgttccatcagatccggtcgtccggcatcgagcagcgtcacggcgctgttgaacgtgaccactccgctacaggggcggcggcggtgattttcctcgcggcgagcgcggcggcaggccgcgcagtcgcagccgaagaccggcaccagctgagcgccgccggtgccggttaagcggagggtcaggctcatcgtgtcaccttttgtttataccagttgatccgcttcgcgcgccgcgtggctgcgcagcaggcggaaaaattcatcgaccgattgtcggagactgccgtcgttattcaatgtcaggcagttgtccggcttatagcgcgcggcgcggtccagacgctgggcgatttccagcgcattttcccggccgcgctgctccagccgctggcgcagcaccggcggcgagacggcgagacagatcggcaccagcacctcgccgtagcgttcccgggccagcgccagatgggcgcgggagccgttggccaccacgtcaaagccggcgtgcagccagaggtcgatctccacgccaatgccatagtaagtattgttggcgtgccagctgagagcaaaaagatgctgctcggcgcgggtaaaaaactcatgttcgctgagggcgatatgattctcgctgcccgcgttaaacgggcgggttatgtaacgatgggccaccagcagctgcgggtgctcgcgctggcgcagcgccgccagcaggctatctttaccggagccggaggggcccaccagccaaatcagttttcctggcattaaaagaccctctttccctggcgccagacatggtcgatctggatatgttcgccgcgacggtgcgccagcaccaggtcggcgcgtttcccctcggcgatgacgccgcgatcgtcaaggcccagcgcctgcgccggatgctgactgaccagacggatcgcctgtggcagggtgaaggcattgtcctcggcgtcggcgatgcggaaagcggcatccagcaggctggcggggtaatagtcagatgagaggatgtccagcaaaccgtggctcgccagctggtgggcggcgacgttgccggagtgggaaccgccgcgcacgatattcggcgcccccatcaggacgtgcatcccgtgctgacgtgaagcctgcgccgcggccagcgtggtgggaaactcggcgatcacgctccctagctggtgagattcggccacatgcgcttcggtggcgtcgtcgtggctggcgagggcgatacggcgggcgcggcacatggcggcgatggtctggcgattgggctgcgaccaggtggcggccagagccatctgctcggcttcaaaacggtccatttcgtcatgcgtcagatgatatttgccctgataataatcgcggtacttgctgcgatcggcgtactgacgctggcccggcgagtggtccatcagagagaccatgctcaccgactcgcgatcgatcagcttttcaaacagcggcagcgtggtgtgatgcggcagctcgcagcgcaggtgcaggcggtgttcggcgcggttgagaccgcgcttttgcgtctcctccacggcattgaccatcttctccagattctcaagacgatcgccgccatcgcgcacgtcgccaatcgccacggcgtccagcacggtggtgatgccgctggcgaccatcatggcgtcatggctgctcatcgccgagtgggccggccagtctaccttcggccgcggggtaaagaacttgtcgaggttatcggtatgcagctcgataaggcccggcagcagccagccgtcttccccatccagcgcctgcggcagccggctctggctttcggcgaaggcgaggatgcgaccgtcatggacttccagcgaaccgtggaccacctcgtcgtcgagaaccagttttacgttattgataatcatgctgtcattcccatagagtgcagtcggtcggcgacctgacggcgtaccccttcgtcatggaaaatccccacgatggccgcgccgcgcgctttggcatcgtggatcaggttgaccacggcagcactgtttttgccatccagtgaggcggtgggttcatcaaggagcaggatcggatagtcgaccgcaaaaccgcgggcgatgttgacccgctgctgctcgccgccggaaaaggtggacggcgcaaggtgccacaggcgttccggaacgttgaggcgggtcaggagctgggcggctttggcggcgctcgcttcgcgcggcgtcccaagatcgagcagcggctgcatcaccacctccagcgccgaaatgcgcgggatcacccgtagaaactggctgacccagccgatggtggttttgcgcacttccagcaccttgcgtggggtggcggtgaccaggtccacccattcgtcgccgtggcggatatggatatggccgctgtccggcagataattggcgtacagcgaacgcagcagggtcgatttgccgctgccggagtgaccgtggagcaccacgcactccccgacgttaacggtcagcgaggcgtcggccagcaccggcagacgcacgccgtgctgctggtgcagaacaaaggttttatggacgttttcaacgcggatcatgttagctctcacggggttgagttgccgggtggcgcttcgcttacccgacctacgaataacgcacctgtgggccgggtaaggcgcagccgccacccggcaaaacagcatcaattctgcaacaccgacgacaccagcagctgggtgtaaggatggtgcggatcgtcgagcacccggtcggttaagccactctccaccacctggccctgcttcatcaccagcagacggttcgccagcaggcgagcgacgccgagatcgtgggtaacaatcaccaccgccagattcagctccaccgccaggccgcgcagcaggtctagcagccgcgcctgcacggacacatccagcccgccggtgggttcatccataaacaccagcttcggctgggtgaccagattgcgggcgatctgcagacgctgctgcatgccgccggagaaggtggtgggcaggtcgtcgatgcgcgagggcgggatctccacctcctgcagccacttttcggcggtggcgcgaatgttgccgtagtggcgggcgccggtggccattagccgttcgccgatgttgcccccggcggagacctggcgacgcagaccgtccatcgggtgctgatgcactacgccccattcggtgcgcaacaggcgtcggcgttcggcttcgctcatggcgtacagcgagcgctgctggtacagcacctcgccctgctgcggcgtcaggcgggcggagattgccttcagcagggtggttttaccggagccggactcgccgacgatgccgagcacttctcccggccacagctcgaaggagacatcgcgaaaacctttatccggggcgtagagatgggtcaggttattcacagcaagtaatggctggttcattttttctgcccctcgctctgctggcggcaatagtcggtatcggagcagacaaacatccgctgcccgctgtcatccagtaccacttcgtcgaggtagctgtggcgcgagccgcagatggcgcagggctcatcccactcctgcacggtaaagggatggtcgtcgaaatcgagactctccaccggggtatagggcggcacggcgtagatccgcttttcgcgcccggcgccgaacagctgcagcgccggcatcatgtgcattttcgggttatcgaatttcgggatcggcgaagggtccatcacgtagcggccattgaccttcaccggataggcgtaggtggtggcgatatggccgaagcgggcgatatcttcatacagtttcacctgcatgacgccgtactcttccagggcgtgcatggtgcgggtttcggtttcacgcggctcgataaagcgcagtggctccgggatcggcacttggtagatcaggatctgatcctccaccagcggcgtctccgggatccggtggcgggtctggatcagggtggcgtcttcggtacgctcggtggtggcgacgccggtgacgcgcttaaagaactgacgaatcgacaccgcgttggtggtgtcatccgcgccctggtcaatcaccttcagcacgtcgttctcaccgatgacgctggcggtcagctggatgccgccggtgccccagccgtagggcattggcatttcgcgcccgccgaacggcacctggtagccgggaatcgctaccgctttgagaatagcccggcggatcatgcgcttggtttgctcgtcgaggtaagcaaagttatagccagtcagtgggttagccacgttcgttctcccgttgcaggcgtttcagcagcgccagttcggcctggaaatcgacatagtgcggtagcttcagatgcgagacgaagccggccgcttcgacgttatcggcgtgggccagcacaaactcttcatcctgcgccgggccggcaatctcttcgtcatagtccggcgcctgcagcgcacggtcgaccagcgccatggccatcgctttgcgctcgctcatgccgaaggtcaggccgtagccgcgggtgaagtgcggcggctcctcctgcggggcgacgaagccattaaccatctcgcactcggtcagcagcagctcgccaatattgacgctaaagcccagctcttccgggacgatttccacctgcacgtagccgctgcggatctcgccggcaaacggatggttgcggccatagccgcgctgggtcgaataggccagcgccagcaggtagccttcatcgccgcgcatcagctgctgcaggcgcgaggaacgcgagcaggggtagaccggcggggtgcgggtgatatcgtcgggcggcgtgccgcgatcttcctcggtcttcgccagcccctgctgcgtgagcaggctaaagacgtgcggcgtcggctctgcttcgccatcggcttgctgcacagacggcgcttcgccattggccagcagggtaaaatcgagcaggcggtgggtgtagtcgtaagtggggcccagcagctggccgccggggatatctttatacactgcggagatgcggcgttcgaggcgcatctccgcggtattaatcggttcgctgaccgccagccgcggcagggtggtgcggtaggcgcgcagcagaaatattgcttcgatgttatcgccgctggcctgcttcagcgccagcgccgccagttcgcggtcggcgatgccgccctcggtcatcacccggtccaccgccaggctgagctggtcgcctatctgttcgacgctcagttcgggaagccgtccatcgccccgtcgtttctgttcctgtaaggcgtgagcggcgcggatcgccttctcgccgcccttgacggcaacgtacatttagcacacctccacgtgggtggtgcgcgggatcgccagcaggcgctcgccgcaggtgaggatcaggtcgatgcccagcgggaacggatgcgggcgttcggttaattcgtcgatgatgcagtccggcagctgcggcgcgatcattcgctcttcggcaatgcctgccccggtcaggcgcagcatgcgtccgccgctgaggctggcaagctgaacgatcagtgtgacgccggtttccggcgcggtgacggtgccagcggaaaggacgttgagctgctcggcgctgataccgtcattggcgacggcaaaaaccgcctgctgcggctggtccaccagcggcgcgccggtatgaaagcgcagattctgtcccaccagatcgttacgcagagcgctggcgagccagaccggtgtttcatgatcggcaagggtcaacagcaggctggtggaggccacgttcaatggctgccagccgtgctgaagctgctgcagggagacaatcacccccggctcgctcatcgctttcagcagtcgacgaaaactgtgttgggcatcctgcacagccagggtaaaagcgggttgtaaggtcatgcgttatctccgcgaaccagggtaaagaagtcgacccggctggcgttgacttcggcgcgtcgggcttcaatgcgcgcgctgcgtagcgcttccagcggggttatcagagtttccattaaggtgtgaaaatggcggggcgactgcagcagggcgtcgatcgccgcgcagcgttcagcgtgcgggcggtcgcggcctaagatccagctgtaaccgagggtaccgtcagccaggcgtaccgctgcgcgggtaagggtggcgtcgccggcaaagaagcggtcgccgataccgcccatgcgggcctggagctgtaccagcccggtttccggggtgcgaatcaattcatattccggcgccagctgcagggactgcatgcgcgccagaaggtcctgcggttcactgtgggccagcacggacatccagcgctggcgggtggcggtatcgaagtgcattcagtgctccatggtaaattcaatcatgtcggcgcgggtcaggctgacggagtactccgccgtgagcgactcgccctcgcggctattgagcgtgcggacgcagagcagcggcgccatattggggatttccagcagcttgctctcttttgcctgcgcgcggcgggcgctaattttggtgcgtacgcgggtcagttcgacgtcgagccgatcgcgtagcagatcgtgcagcgagccgtggctgaaggtctgtagcaccggccagaagcgcaggtcggcgaagtagtggtcgatcaggcacagggcgacgccattgacccggcgcagggtacgcaggtggatcacgttctcgccctcattgatgccaaaggcttcggcgacatgggcgctggcggggcgcagcaccgacagcagcttttcgctggtgggatcgctgccttgttccagcaggttttggctgaagcgcgcctgggcgttaagcgggtagtcgatggggcgcatcagcaccagcacacccacgccctgacggcgctgaacccagccgcgctcaaccagctggtcgatagcccggcgcagggtgtggcggttaacgtcgaagcgtgtcgccagctgctgctcggcgggcagatagtcgccgcagcgataatggtggcgcagctcctgctcaagtcgggcggcgatttcctgatagcgcgtggggtaactggtcggatgtctggacaggtgcatggtcatcaagcctcacacagcatagacgaggagcttcctcgcgttgtgggccgatcctgaccggtttatgttgcatttcggttaagtgacgatgaccaaaggatgaagagttgatgccaggcggatgacagggcggccgggccgccctgggggcgtcagccttgtttgaccacgttgatcatccaggggacgccaaagcggtcgacgactttgccgaagccgtgggcccagaaggtttcctgccaggccatctcaatgcgcccgccgacagccagcgcgtcgaaccagcgctggccttcagcgacatcgctgggatcgaggacgagggtgaagccggcgtaatgcacatcgggcccgaaggcgctgtcgctcagcatcagctcgccattattgatgcgcaggctggcgtgggcgatagcatcatccgccatcttctggccagacgggcagccgtctgacgcttcctgcgccgggggcggcatttcgccaaaggtcattttaaacatcagctctgcgcccagcgtctgctggtagaaggcgatcgcctcggcgcagttgcccgcaaaggcaaggtagggacttaaggacatggtgaatacctcagtgaccgtaacccgtaaagcgtagtcgcccggcaggcgattgagccagacggcagggcgaaaaggggcgctgaaatatgacggcaggcgacagtgtaaatagcggttgccggagagggaaataacaggatgcgccgggtgacaaacggccaccaggatatcgggagcggcgacggttatgtgaaaaaataatcgcgccgcctacccgaaattaaatcagttctttttcacaaattccgatttgagcttcatcggaccaaaaccgtcaattttgcagtcaatattgtgatcgccttcgacaagacggatatttttcactttggtgccgattttcagcatcgaagagctgcctttaaccttcagatctttcacgacggtaacgctgtcgccatcggccagtaaattgccattggcatctttaacgatcagaatgtcgctctcttccgtcacctcggcagggttccactcatgggcacattccgggcagatgtacatgccgctatcttcataagtgtaagtcgaatcgcattttgggcagtgtggcagttgcatgacgctcctcatgatgtcgtcgaaaaacaggacgttggtcctttaaacagcggctgagagccgaaagtgggtatgattatagcgcaatcacccacttttgtcgggtgtttttttgctaaaaagtagccgtggtattattccgggaaaaagcgaataaacgctgaaattaaccgcccgaagtagagcaaaatcgacgaaataatttccgcgcgatcggcaggaaatgaacttatttattttccgacactctgtaatgaggcggtaaatttctgtgaagttgatcgcagatataaacactgttagggtaaaaaaggggagcaggtcaatttcatcaagcatcacgatgagccgctccatttattcaccagtagccagagcaggcgtcaacaggttcggttgtacattctgtcagcagacagtgcaggcaaacctgctacgcttgaaatgaggagcacagcaattcaccgctcctgacgcacgatgcgaatggccttgccattcggcgaagaggcgtgcactcaaggcggagtagcagaggaaaaatatgcttaaaaggaaaaaaataaagcccatcacccttaaggatgtgaccatcatcgatgatggtaaactgaaaaaggcgatcaccgcggcctccctgggcaacgcgatggagtggttcgatttcggcgtctacggctttgtggcctacgccttaggtaaagtcttcttccccgatgccaacccaagcgtgcagatgattgccgcgctgggtaccttctccgtaccatttttaattcgtccgttaggcggcctgttcttcgggatgctgggcgataaatatggtcggcaaaaaattctcgcgataactatcgtgatcatgtcgataagtactttctgtatcggccttattccgtcgtatgccacgataggtatctgggcaccgatcctgctgctgctgtgtaaaatggcgcaaggcttctcggttggcggtgaatataccggggcgtcgatcttcgtcgcggaatactctcctgaccgcaagcgcggctttatgggcagctggctggactttggctccatcgccgggtttgtgatgggggccggcgtggtggttctcatctccagcgtggtgggtgaacagaactttctcgactggggttggcgtatcccgttcttcctggcgctaccgttaggtatcattggtctctacctgcgccatgcgctggaagagacgccggcgttccagcagcatgttgacaccatggagcagggcgaccgtgaaggactgcaggacgggccgaaggtctcttttaaagagattgccaccaagcactggcgtagcctgctgacctgtatcggtctggtgatttccaccaacgtgacttactacatgctgctgacctacatgccgagctatctgtcgcataacctgcactactcggaagatcatggggtgctgatcatcatcgctatcatggtcgggatgctgtttgtacagccggttatcggtatgctcagcgaccgtttcggccgtcgcccgtttatcctgattggtagcgtggcgctgtttgccctgtcgatcccggccttcattatgatcaacagcaacgtgactggcctgatcttcgccggcctgctgctgctggcggtggtgctgaactgctttatcggggtgatggcctcctcgctgccggcgatgttcccgacgcacatccgcttcagcgccctggccagcgcctttaacatctcggtgctgattgccggtctgacgccaaccctggcggcgtggctggtggagaccacccaaaacctgatgatgccggcgtactacctgatggttatcgcggtggtgggtatggcgacgggcctgtcgatgaaagagacggctaaccgtccgctgaaaggggcgaccccggcggcgtcggatatccaggaagcgaaagaaatccttggcgagcactacgataacatcgagcaaaaaatcgaagatatcgatcaggagatcgccgatctgcaggcaaaacggtcgcgtctggtgcagcagcatccgcgtatcaacgactaaccgttttcactgttaatcatgccgcctggggaaaccccggcggcattttttatgcctccggcaaggccaggccgtgacgccgctgctggctgagtttacggtactgctgcggcggcatgcccacgtagcgggtaaaggtgctgtagaagcgactgctggagcgaaaaccggcggtaagggcaatatccaggatggtcttgtcggtatcgctcagcagcgcccgcacatgattgatacgcatggcggtaatgtactgcttcatggtctgctgcatcacccgctgaaagacccccatcgcgtagttcgggttgagcttcacgtgctcggcaacggcattgacggtcagcgcctggtcgtagtgggcagcgataaactccagcatctggctgacataaaactgcgcgtggcgcgagacgctgttcttgtgggtgcgtgaggttttattgaccagaatcggctgccagccggcgaggctcagccgcttcagcatcagggcgatttcatcgatcgccagctggcgtatctgttcattctcgtggctcagttcctgctgccagcggcgtacttcgaaggcgctcaactgctgcgcggcgagggatttaatcaccatcccatgggtgacgtggttgataagctcccggtccagcggccatgagagaaacagatgcatcggcaggttgaatatcgccatctgctggcaatcgccggggcgggtcagctgatgcggcgtacaggcccagaacagagtgatatagcctttctcaatgcgcaccacttcgttattaatcaaatactcgacgtcgccatcgaacggcacgttgacctccacctggccgtgccagtgactggtgggcatggcgtgcggcgggcgcagttcgatatccatacgctgatactcggagtagagcgccagcgggctgcggctctgcttttcgtcgctgctgcacataaagggatcggggggcagagaggtgaagcggtgttccatcgttagcgtattcctgaattgtcagagtggctgcatttttcgccagaactgacgacagcttagcggaagaatcggcccattttctctcctttttgctcaatctgttcccgaaatctcagattttgtggcgcttaatggccgatctgagctttcgggaatgctccggcgggaacagggcagcgcagcggggagcggcgtgccactctgcaagtgttcaatgacctgatggagagtgcgtgatgtctgccccaaaaattacttttatcggcgccggttcgacggtgttcgtcaaaaatattctcggtgatgttttccagcgcccggcgctgaaatcggcgcatatcgcgctgatggatatcgatgaaacccggctggaagagtcgcatatcgtggtgcgcaagctgatggattccgtgggcgcgaacggcgaaatcagctgccaccgcgaccggaaaaccgccctgcagggcgccgattttgtcgtcgttgccttccagattggcggctatgagccctgtaccgtcaccgattttgcagtctgcaagcgccacggcctggagcagaccattgccgatacgctggggccgggaggcattatgcgcgcgctgcgcaccatcccgcacctgtgggctatctgcgacgatatgagcgaggtctgcccggacgccaccatgcttaactacgtcaacccgatggcgatgaacacctgggcgatgtatgcccgctacccgcatatcaagcaggtgggtctgtgccactcggtgcaaggcacagcggaagagctggcgcgcgacctcgatctcgatccggcggatttacgctaccgctgcgcggggattaaccatatggcgttctatctgtcgctggagaaaaagctcgcggacggcagctacgtcagtatctaccccgacctgctacaggcctacgccgacggacgggcgccgaaaccgaacctgcacggcaacccgcgctgcgaaaacatcgtccgctatgaaatgctcaaaaagctgggctactttgtcaccgagtcctcggagcatttcgcggaatacacgccatggtttatcaagccgggccgcgatgaccttctcgctcgctataaagtgccgctggatgaataccctaaacgctgcgtcgagcaactggccaactggcatcaggagctggagagctataagcgcggggagcgcattgaggtgaaaccctcccgcgaatatgccagcaccatcatgaacgccatctggaccggcgagccaagcgtggtgtacggcaacgtgcgaaacgataatctcatcgacaacctgcctcagggctgctgtgtggaagtggcctgcctggtggacgccaacggcatccagccgaccaaagtgggcgcgctgccggcgcatctggcggcgctgatgcagaccaatatcaacgtgcagacgctgctcacggaggcgatcctcaccgaaaatcgcgattacgtctattacgccacgatgatggatccgcacaccgccgcggtgctggggatcgaagagatctacgcgctggtggacgatctgatcgccagccacggcgactggctgccggcctggctgcaccgttaatcctcttatgccgccgggggcaacgaacccggcggtgcctgtcacgctctatcaaacgctgaaggaggcgctggcgacagcgacctggaccctatgagtatttcaatgacaacaaagctcagctacggatttggtgcctttggtaaagatttcgctatcggtatcgtctacatgtacctgatgtattactacaccgatattgttggcttatcggtcggggtggttggcaccttgttcctggtggcaaggatcctcgatgcgatagccgatccgattatgggatggatcgttaactgtacgcggtcgcgatggggaaagttcaaaccgtggatcctgatcggcacgataaccaactcggtggtgctgtatatgctgttcagcgcccaccatttcagcggcggggcgctgctggcgtgggtgtggctaacctacctgctgtggggcttcacctacaccatcatggatgtgccgttctggtcgttggtgccgaccattaccctcgataaacgcgaacgcgagcagctggtgccttacccgcgctttttcgccagtctggcgggatttgtcacggccggcgtcacgctgccgttcgtcaacgccgtcggcggcgccgatcgcggtttcggttttcagatgttcactctggtgctgatcgccttcttcgtcgtttccaccctcgtcaccctgcgcaacgtgcatgaggtttactcctccgacagtggtgtgagcgaagactccagccacctctcactgcgccagatggtggcgctgatctataaaaacgatcagctggcctgcctgttaggcatggcgctggcctataacacggcggcgaacattatcgctggctttgcgatttactactttacctacgtgattggcagcgcggagatgttcccgtattacatgtcctacgccggggcggcgaatttgctgacgctgatcctgttcccacgactggtaaaagggctatcgcggcgcattctgtgggcgggtgcttcgatcatgccggtgctgggctgcggcgtgctgttgctgatggcgctgggcggcgtttacaacatcgcgctgatttcgctggccggggtgctgttgaatatcggcaccgcgctgttctgggtgctgcaggttattatggtggccgataccgtcgactatggcgaatatacgatgaatatccgctgcgaaagcatcgcctattccgttcaaacgctggtagtcaaagccggttcggcgtttgcggcctggtttatcgctatcgtgctcggtatcatcggttacgtgccgaatgttgtgcagtcgccccacacgctgctggggatgcaggcgattatgattgcgctgccgacgctcttttttgctctgacgctgtttctctatttccgttattacaaactgaatggcgatatgctgcgacggattcagattcacctgctggataaatatcgccgggtaccggaaaatgacgtcgagccggaacggccgattgtggtacccaatcaggtgtaaaaagcgtgcgaaaaccgctgacgaaagaggggagggatgctctctttttgagcaaaaaacagtgtcttaaaaagacagaaagagaaaactgtagttctctattttatctcaattatttctctttttgagcgttctggactgtttgtttctccgattgttctcaaataaaactcagaattgtctctttttcgtgctcttgcgctgctttttaactcttgctactctttttgggtcttacatttttctcttatttgtctcagtgatggagcaatgcaatgcgcatttttatcgatgatggttcaaccaatatcaaaatgctgtgggagcaagatggcgaaactttcacccatatcagccccaacagttttaaacgcggctggtctgccaccttcggttcggggaagccttttaactacacggtggatgatgaaaagtactcattcgacctgatcactcccgatgcgctcccaaccaataacattgactggcaatatagcccgttgaactccatcgctgtccatcatgcgctgctgaccagcggtcttgagccacaggatgttgaaattgtggtcaccctgccgctgaccgaattttatgatgaagatgcgcaatatcgcctcgacaatattgagcgcaagaaaaagagcctgctgcgcgaagttaaactgaataaaggcgtggtgttcaatatcactaaagttaccgtgcgcccggaatcgattccggcgggcattagcctgtgtgatgagctgaaaccgtcgcattcggtgctgattatcgaccttggcggcaccacgctggatatttcaatggtcgccgggcagatgacctcggtttcgcgcatttacggcgacccgaagctgggcgtatcgctggtgaccgacgccgttaagctggcgctggcccgggcgaataccgacacctctagctataacgtcgaccagataatcatcaaccgccacgacgaagaatacctgaccgacaacatcaacgatccggatgcggtttctgaggtgaagaaggtgatcaataacagtatcgaacgtctgaccacgcgtgtcctgacggccatcgatagctttaaaggctattcgcacgcgatcgtcattggcggcggcgcgccgctggttgccgacgccattcgtgaacggatgggtctgcgcgaggatcgtttcgtggtggctgaagagccgcagtttgccctggtgcgtggtctgaaaattattggttaaggagcgtctatgactctggatcgcagaaaagtgctgatttacctgcgcccggatatcagcgccagcgagcgcttcgcggacgcaaaaattgaggcccatcaccgtggcgaccgcggcgatatgtcgcgtaccgcgctgctggcggggctagcgttaggggaagtcgatagccgcttaccgtcgatgctggcggcgctgctggcggaagatactaaaccggaaacgctgcgtaagatgctggcctcgttccttgagatccagccggcctctcccgccccggcagccgcgccagcagccgccccggctaaggcgccggagccgcccgcgccggtgagcgagagcgtctccgcgcgtaatctcgccggttcgttaccggattaagcgctattcccggtttgcgcgacccgggaaactccccggcttgcgctgcgcttagtttgtaggccgggtatggcgtagccgccattcggcaaacaggcggctccctggctggggtcatgcccggcggcgctacgcttgcgcgggcctacggatccagtgtaatggtgggtccagtaccatttgtaggccgggtaaggcgtagccgccacccggcatacaggcggctccctggctggggccatgcccggcggcgctacgcttgcgcgggtctacaaatccagtgcaatggtgggaccagtgccatttgtaggccgggtaaggcgtagccgccacccggcatacaggcggctccctggctggggccatgcccggcggcgctacgcttgcgcgggcctacggatccagttcaatggtgggccctgtgccatttgtaggccgggtaaggcgtagccgccacccggcatacaggcggctcccaggctggggccatgcccggcggcgctacgcttgcgcgggcctacaaatccagtgcaatggtgggcccagtgccgtttgtaggccgggtatggcgtagccgccacccggcatacaggcggctcccaggctggggccatgcccggcggcgctacgcttgcgcgggcctacggatccagtgcaatggtgggtccagtgccgtttgtaggccgggtaaggcgtagccgccacccggcatacaggcggctccctggctggggccatgcccggcggcgctacgcttgcgcgggcctacggatccagtgcaatgggtgggctcgatgtcatttgtaggccgggtaaggcgtagccgccacccggcatacaggcggctccctggctggggccatgcccggcggcgctacgcttgcgcgggcctacggatccagttcaatggtgggctccagtgccgtttgtatgccgggtatggcgtagccgccacccggcatacaggcggctccctggctggggtcatgcccggcggcgctacgcttgcgcgggcctacggatccagtgtaatggtgggtccagtaccatttgtaggccgggtaaggcgtagccgccacccggcgcgaagacggaacgccacgacccgggatggcacccctatccgtgggcgaggaagcgcgccaggcgctgctgcagcaggcgattttcgcgggtcagccgcgcgttctcatccagcagggtcagcgccaccgcaattcccggccagtccagctccagctcgttacgcaggcgtaccgcgcgatgcacgatcgtcaccgcgctgtcgtcgaacagccaggtgtccgcctgcggctggtgtggctcaatcatccctaagccgacgatctccgtcagctcctcttccgacaccccggtacgcaggcacaattcggtaatggtaaacgtcactgttactgtagccatcaggctttcccccatgtcttacgcggatcgaagctggcttcggcggcggccaattgttgccagagctcacgcgctttttcatctggttttgtcggcatcactattttaataacggcgaacaaatcgccggtgtgggttttgctcacgagtcctttccctttgatacgcagtcgctgccctgcctgactgcccggcggcaccgtcagcagaatgctctctttcagggtgggcaccgtcactttcgcgcccagcgcggcctcccatggcgccagcggcaggacgatctccaggttatgaccgacaatatcgaatagcggatgcggggcgatgtggataaccagccacagatcgccgttcgggccgccattctcccccggcgtcccctggcctttcaggcggatacgctgaccatcgactaccccggcggggatcttcacattcagcgttttcggcgtttcgctttcgatcatgccaaacacgttgtacaccggcaggttatagctgatagtgcgcgtctgctcggccagcgtctcttcaaggaacaccgccacttcgatctccagatcgtggccgcgcgccgcgtgttgacgacgacgctgatgcgcctgctggccaaacatggaggagaagatgtcgtcgaaatcttgctgactgtagctctgctcgtgggtctgtcgctggcgaccgaagccgggatcgttgcgatgctgccagagctgatcgtattcggcgcgccgttgctcatctttcaggacttcccaggcttcggcgagatccttaaatttggcttcggcatcgttttctttactgacgtcggggtgatatttgcgcgccaggcggcggtaggcggtcttgatggttttcagatcgtcggttggttgcaccccgagaatggcataataatccttcaattccatgattttatctcatctatgctcagtgcggtggttacatattccctggaacaggcgtcagtataaagcgtagggcaaatgcgccctgacggggaagaaaagtggcggaaacttgacgccgtcggggtcgacggcgccgtggataagattagtctttcgcctgcggccgtgggcggcggcgccatccggtgaatagcaccagcagcgcgccgacggcgccagccaggcgcgcggtgccctcgccggcgctgggaaacagctggcgaatggtagggtcgctgaccagcattgacccggcaatccagccgatgagcatcccgcccagcagcaccaccgcgggaaagcgggtgagcaggaccagcaccagcttgctgccggcgacaataaccggaatgctgatcgccacgccgagggcgaccagcgcaatgtgccctttccccgcagcagctaccgccagtacgttatccagcgacataatcacatcggcaacggtgatggtgatcgcggtgcgccacaggctgccagagctgctaacctcgctctcttcttcctcattcctgaccagcttgatgccaatccacagcaggagcagcgcgccgactattttcagccacggcagcgacaggagatacaaagcgatcgccagcagcagaacgcgcgccaggatggcgcccacggtaccgatgatgatcgctttggtgcgtttctgcggcggcagtttgcggcaggccatggcgatcaccacggcattgtcgccacccagcagtaagtcgatggcgacaatctgcagcataatcactgccatgtcccattgttgaagaaatgcatgcatatcgagagaaaccacctgaaaaaagagcaagaaaaaccgctgcgcagggtactccgcctgggccgcgttgaccactggcgcagacctgcgctatcgcgcgggaaagagagagcctgaaaaataaagttacgaatcaaggcgccgttgggcaaggcttcggcgaaaaagggtgatattttgtcacccagactcacctgccgttcacttatcgcaaggatccccactatgtctggccacaagaaatacctctctgtcgccctgctgagcgctgtcttactgccggcgatggcctctgccgctgacgcgccggcgactttcaccccggaacaggaggcgaaaatcggcaaaatagccgccgactatctggttgcccacccggaagtcctgctgcaggcgagccagaaactgcagcaaattcaggctgagcagcaggccagcgcggccactcaggcggtgctgaagaacgccgccgtgttgacccaggataaaaataccccgacctacggcccggccaacggcaaagtcacggtgatcgaattcttcgactaccagtgcgtctactgcagccgtctggcgccggtgatggagcaggtgattaaagcgcacccgcagacccgcttcgccttcaaagagtggccgattttcggcggccgctgggaaagctcgctggaggcggcaaaaaccggcctgcagatctatcaacagaaaggggcggatgcctatctggcctaccataacgggatttacgctaccggccataacgaaggcaagctgacgacggcggatatccagcagcaggcgaagaaagccggcttcgatgcgaagaaggccgccgacgtcgaaccggtgctgcagagcattaacgatctggcgcaggagattggtctgagcggcacgccgggcgtgatcgtgatgccgaccaccggcgccacggaagccagcatcaccgtcttcccggggctggcagacaaagcctcgctggaagccgccatcaaaaaagccggcggctaatccccggcgtattacctgtccaggccgccgacggcggccttgctctcatgcgtcatcgctctcttcctgcggcggtggtaacgcgtggctttttaaatcaataatctgcccgatttgatcgtggtaaacggtgagcaaattatagcggctcatctccgagataatctgcggcgcgacgttaaagctgctcgccagctcatcgtcgcgcagagcgagcaccgcggtatgacgccgggtatgggcgcggcgccggttgtagtgataccagaggatcaacagccagccgttcagcgcggcaatcagcagatacatcagcgccgtattcagggagtccatcagcgtttcccagttcggagagggcggcgcgatgaactgcatcagcaaattggcgtacagaaagaacagaaaaccgagccaggccagcagcgttaagccggcgtcgaccagccggggcagcacccgatgttcggttaagatgagcgtattttcattcatcacaggcttccttttccccggtccggactcacccagcgcgcgcgggaacgttgacgtttcaccatcactttcggaaaagcgaccagcgtggtcagcaggccgatcatccagtagaccatcgggaaccagatcacccagaacagcgatttggcgacctttttctcatagcgccgctcgatatacaggctggcgacgaactgcagcaggcacatcaggccgagcagcatgccggtgaattccggtggaaacaggctatgcaccgccagattgtcaggcagcggtatcaggcggctgaggataaacagcagaatggtgatcgcgtaggcaaaggcccacagcgtggagcaggcatactccagaaacagcggccacatccggtgatgctgccagtgaaacaggcggcgcagattgaccagaaagacttcggcgccgccctgggcccagcgcagacgctgcttccataaccctttgagggtctccggcatcaggatccagcacagcgctcgcggctcgaaaaagatgtcccagtggcggagctgaagcttccagctgatatcaatatcttcagtgatcatatccgggctccagtagccgacgtccgccagcgcctggcgccggaaggcggcgattacgccggagacggtaaagacccggccatagatccgctgcgtccgtttgataagcccaatgatcgacgagaactccccaacctgaatgcggccgatcagcgtggatcgggtgcggatccgcggattgccggtgaccgccccgacgtgcggataatggatcaacggcgcgaccagccaggccgcggtatcccggtccagcagggcgtcgccatcgatgcagaccagcagatcgccgcgggcggcggcggcgcccgctttgagcgccaccgcttttccctgattggcggccagatggatcacccgcagcctcggctcctcctgcgccagctgctggagcacctgggcggtgttgtccgaagagccgtcgttaatcgcgatcacttcaagattggcgtaacgctgggccagcgctgcgctgatggtttcccgggcgtttttctcctcgttaaagcaggggatcaggatcgagatcagtggattgcccggcagcgtcggcggcggggtatcctccccccacggccagtgacgttccagctgaaaccagaagtagagacccccggtgatccacaacactgacataaacagcggccagaaaaagacaaagtcgaggataagctcgccggtaaataccgctgcgacacctaacggcagcccgaatacgaggcataaaatgcacaatgcgataatgcgatcagtcatggtcagggtaccaccaggaagaaaattgcggcctgatacgagagatatcaggctggttgttaataaaatcgtcagggtagtagccgtagtttttgacgccgttcagccgcagcaaacgcatccagtccgccagctgctggtcgggaatggcgttttgctggcgtcgattccagtctctggcctgcagttcaaagatggttttcttcagcgcacccgggtggcgggcgacggcctgcaccagccgcgtcagccaggcctggctggcgtcgatcggcacggactccatcagcggcatcgccatggggaccgtccagtcataggcggcaaggaagtcatccagattctgcgcaaaccaggcttcgctttgcggctccaggatcggcagggcgaagagattacgcgccgttttcacctgcgggccgcggatggcctgcactgcctggcgtagatccagagtgaagcgggtcagggtttggcttttgaaacgcatccatgcctggcgctcttgcggacgttggggcaccgggtcggcatcgtgcgccatacccgtctgccgccaggcggcgaccgcctccggactcacgtcttcaaaatcggtcagcacggcgtcgtcgtgaaacaggatcccgctgaagctggcgtgtcgggccagatcttcgtagatgtcggtgatctgctggcgaacccggggatcccagggcgacagacggacgtacggctggcgggcaagtaacgccttcccggtttgcggatcccagcgctgaacgcgcggcagatctgaggcaagatcgaaggccagcaccggcatccaggcataaaccttcacattgccgcgggtctgcaactgccaggagacgaagttaaacaggtcggcgcgcatcggcagccagcggttggggaaatagagcgacttgaccgtgccgtcgccctgcgggtcggagaaggcctgcagaaagacgtggctgattttcatgtcatagacgcgctgcaccagcttatcgatattctttgcctgctggacgggattggggtcatagacatagtccagatccacatgcatcacccgaacaggatcggcttcctgaatctgggtcacggcgctggcaaaggccttgagcgacgggttaccggcgatcagcaggcgtggaatattgtccagatccttcacgttgcccaggccgtcgttcagcgtaaacgccagctgatacccttgctgtttggcgatggccagggtgctgccgctggcggcgccgtagggccacacccaggcgcgcggcgttttcccggcaacctcatggattttcgccgtcactttctgcacgtcatcggtcattcgccgggtaaactgcgcgtcgctttcatagcggccggtggttttatcccagccgcggttggcggcggcaggctcgcggctgccctgcggattggccggcagaccgtagtgcgaggcccaggtgtgcgcgccgatctccaccagcggcgagcggctgagctcgcgcaccatctcccaggtagcgaagcgctcgcgcggcgtcatcaggccgccaaaattaacgggctgaccagcgggagtgtccacccagctgcccaccggcgcccatagcgccgggacgttccaggctttaagcagcggccatacgcgggtgtaaaagctgctgtaaccatcgtcaaaactgaggagaaaagccttgggcggcagcgactttaagccataatgcgcatcgagaatgtcctgaacgctaatcgcatggtagccgttatgcagcagccaggcgatctgctcattgagtgcgctggtgcgcaccgaaagataacgctggtcggcggcatcgtcttcgacgtcatggtaggccagcaccagaaagcgatccgccggccagggttgattggcctccagttgggggcgctgctgcggggcgaggaaggggacttcctcagcacgcacgctgaagataaggcacagccagatgagaagcatcaggccgttgcgcaggatcgtgttcagcatggtcatccttaaaaccgtatatttgcatcaagagtgatggcgaggttgttttcacgtttgccgtcgtaggggcgcttatcccagttcagcatcaccccggtgtcgacgacgttgttccagcgcaggcgctgcccgtaacccagcaccgtgatcgccccggcggcgtgatttttttgccagtagctgccgccgccggcgagtaactgctggctccagacggtgtcatagcgctggtaaagcgtgtgatcgacggccagcgccgcggtggcggcgaggtcccgtgccggactgtagtaggcggtgtcggtgcggctattggcgctggccgacagaccgggctgcaaatccagcgttaaccatggggtttgccagaggcgttctttaccggagagggtgtactcatggcggcggttgcgatcggtaaaccggctggcggccgcgctgacgcggtactcccggcgttcgtttggagaccagcgcagccagccttcgccgcggttggcgctgacgccgttgcgtaacgcgcgcagcggcgtctgctgcgaaatccgctccagttcgccgcccagctgccagcgatcgctaacgtcatgggcggcggaaaggcggacgccgggcttgttctcgccgtgaaaattgacgctggagagctcaagctcgccccagtagtcgcgcggacgccattcaataccggcaaacagctggcgacggctgcctttcccctcttcaaaattgccttcagcgaagcggtgcccgccgaacaaccgccagctgtcggctagcggcgggctgtagatcgccgtctcaaaactgaggtcgtgcgtgccgctcaccgggttgtcggaatgcagccctttgccaacgctcaggcgcagctcggagagataatggatctcgcgcgctctggccaggcgctgggtgttcagatcccgtggcgagcgggcgacgacgtcgtcagccagcagatccatttgccgccactcctgcagatcgagggcgacccaggcctgctggcgctccagctgcaggctggcgggttccagagattccgccgcttttagctggcgttcggctgcccgtggcaatcctctctcctgcagaagggcggcatagtctatctgcaggccctggtttccaggggccgtcgccgccaggcgctgcattcgggcttcggcctgcggcaggtcgttggtagccgctaaatagtgcacgttaagcgactgtgcggtgagccagtcgtcgttcggctgcggcgttggcgagccgtagagacgacggatgtagggcgcattcctggtgaggcgggcgacataccgttgcgcctccgggtactgaccggtgtccagcagagcgtagaaaagctcgtgttcctcattctgttggcttgtcagccacgaaggatgctggtggataagcgtcagcgcaggctcaatttgcttaagggcgataaaagaggagatgacccagccgatggcccagtcgggaacggtctgctgctgggcgatcaggctttggtattcgcggatgacctgcgcgtactcggcgctggcgtacagcgcgcccagacgatcaatacgcgcccggatgatgtcgggcgcagcctgtgggtcggggtgccaggcggcgatcatcgcgtcatactgcgtgagcgccgtgcgggccagcgcgtaacgcgccttttcttcgcgggaaggggtatcggcaaggcgcaccagttcggcggcggcgttcagctgcaagttacgcttttccgcaggcgtcagttcgacgctattcgccaggccgagagcaggggaatcaatccggttgcgggtcagggtcgccatcaggctggccagcgcggttttgttttgcggttcacgatcgaggatctgcgtgtccaccaacagctggtcccagcttttgcccagccgcaggtagacataggagagcgtctgcaggtgcgcaacgctcgcctgctccgccaccaggcgacgcgcttcgctgagcgcctcgccgtccttgcgggcatcggcgagcgttttgatatagccgatacgatagtcgtcgctgccaggggcctggctgagcgcctgctgccagagggtgagcgaggtttgccactgcttctggttgcgcagggcctgcgccgcggcggcggtgccccgtgcaggaagcggcatatagacctggtagcgtcgccagactttcaccacttcatcgtcctgaccggcccagagggccacctgcagccagtccgccacctgagaaggggttaaggcatgccgcagctggtactgctgaaggtaactgagaaagggggcgtactgaccttggcgcgcttgcaagatttgctggtcatagagcgaatccgctccctgaaccagcgccgggaagagcaaaagcaagccgattgatagcgagagtttcgtgttgcgattaaacaataacgtatttgaataaggtgatctttccatttctatttgccatatgttcatcaagaatccattgcacaacacgaccgtcctttgacggtgagttaaaggatgaggatggtcccatttagctgactggcactgcaggtgaatgacctattgcaaactaataaacatatctcctgttgataaatgaatgggtaatttatacccgatacggcaaccgataaatatggataaattatggcctgcgttttaagataattctgtaaaatcgacttcgttcgaacggaagtgttcaagttgatttctttaacctactgatataaataaaaaagaaagtcagatggaattttgtttcaaaatggcggtgtgacttatatttagttggggttagagttttttaggtaatatttaagatgatttctgacaaaaattctcaatagcaaaaaaagcatcttttctgtggattttttttatttataatcaatctgtttatttcctgtcagaacgcaaggagggttttcacagccagattcagatgccgcgctaatgataaatcacaggtctcgttattttcaccgccatgcgaagcgttccatagggggagggaaaacgtctggttgacgagaatttgttgattaaatgttaaagggacgatttgtggcaactttaatgatattggttacccaggattactatctttttcaaggtgttaagaatttttttcctgatatcattcagttagattctagcggaaaagcgattttagataatgaggttgatgaagtctctctgctggttgatagccgctcgccgctttgccattacgattatctcgtgctggcagcggcgaaatccagaaagcgaatatgttgtatcgtcctcgatatgcgccatcgggaagagcatttactgagcctgaaatcgtttttaaacatgtcattatcacccgcggatatggcgacattatttggcctttttctggagatgaatagcaagcgtctgaccaaagagtggtttgacgatctgcgcttaagtttgtctgaacagttaatgttacgtttactcatggcggggatgaccatggaggaggtggccgtcaatctcaatacgtcactaaaaagcctttaccgcaagcgtactgcgctttatgagcggttggggttagataattttaatgaagcttgcttatttatctttcgaaataagctgctggagcagaccgaacgttcgttatgaagcttcgctgtacagagaatggatgttatcgcaaggtatttgttgacgaaaatctaataaattaaatagatattgataggtacaaccgtcgatacccggcggtatcgatgatggcattcggcatataattccggagctctttggaagtatttaccgccaatgcggtttgctatgcacagcgattattataatgaatatattccttgcgccgcacaggaatagttttgtcataaattaacactaccatggtattccgactcacgcgtcggaataccatgagatatcgtgaaagcatcagaggagcgaggtggatgagaataagggacagtattgctgagcggttagaggcatgcggcctctaccgtcgggcggcatccagatggattgaggtgatgcagcgttgcctggacgatgaggaccgagagtggatccgtcaccatcgcaatcagtgtctgaaaaaggcgcaacgtccgccggcgccgaaagaggagtttgccgacctccaccaggcggcgaaagagactcaatatcgtatgggcattgcgaagccctatggcgaagcattcagactgcccggcaaagggaaaacggccgccgagtaatgcctttcttcacgacgtttgcctgacggcttcgccttatccggcctgcggctcctccacaggtttaaacagcgcaggcccgcgcaagcgcagcgccgccgggcgatacacatcagacggcgtacccgcggttgtgcctgatggcggcataaatgccttatcctgcttacaaatggcattgggtccacccatgacattcgtccgtaggtccgcgcaagagcatggggtcagttcattgctgggcggttttttcgttttcaaagcaagagaatacgcatgaaaaaaggatctcaagaagatccttgtgatgtcacgttcagccgttaacaattacgttaatacgactcatatttaagcccgtaattcctactccacctaacgtcaaaaaggggctttctatcaatacaccgatcctctgtcgggatgtcgttaaaacaaaaaacctcatcggtagaaaacagtaggttttcatccggttccgtgcgatatccatccccaaaatcaacaatccatacatggtaaaagccgtctttaccctcgtgtggaatcccgtacttcgcctgtattacggccttattggcttcccaccaggctatctgacgacttttcaggtatggaaaatgcctgaccagaatcgtatttccatcgtgaactgccacaatctcaaccggggacagatactgccatagtagataaccacctaccgcagccgctacaacccccgctatcagtcgcttattcaccccgcctcccgctgatttccacggtcgcattcatctcggtgatgaacggcctatagccgtatttcacatagcgctgcagcacaaaccagatccggaaaattcggccctgatgaaaaacagggttcaggatatccgcgtcatcaagcccgaagtggtcctgtacccggtagtgtactttcgcccggtagctgtcgcccgtcacctccagtgactcgagcgtgatatgcgtcgaccacgtatcatggacggtaatcaccagcccgttagtcttatcgatctgacgatcaaatttaggtagaacagctttattaacttccttaaagttgccctttccgtcgaataaatcgtcctttttaccgagaggaagaaatccatattcgtagctaacagcatcatccaaggcccttttaatccccaacaacgagctatcactcgaatggtcattcaggatctgctctttcagcgccctgtccagtaatgggctgctgtacggtgtgccgctgttcccctgcatatgattaatcatttcggtgatgatgtttttatatgggccatggaaggagaataccttggcaagtccccggaactcatcaaacatcagccggacactttcctcccggctgaccacgaccggcgtacttcccgtcaggctgcccggataaaatacaccatacgaactggcgggcgctggtgggacaagggtcagcgtatacgggttcactttcgccgagacatccgtcagaccaaagcgctctttcagtgcttcctcgctcagatcaccgtggtgcatgtcctttgcgccgtagtcatccattgccctctgcgtggcataaatcagcgccggaaggggcattggctgaggccctttagccttcgcctcattcagttttttcctgctggcttccctctcccgttcggcagccagcccggcattgcagttatattcgtaggtgttatccaaatcttgcggaatgaatttcgcccgacacgggcaggagctgtaactttcgatggagcctgctagctggcggtttacaccgcctacttcgtacatgtcgcccatgccaccacaaatacggtagatccccggatgttttccgcaggtcactttatcgctttcccgcgcctgtgatcgcccgaaaaattcggtgtcttcagcaccggtgataattttaccgccacagacggtacgatctccctggaaaagaaaatagccttccagcgccatcagtgcttatctcccggcacagttaaaaagccatccggcagtgcatcgccctcacggaatacaaacatctgacacccctgaggtgttgaaatgatttcatcaccgttatccagcatgctgcccacgagcgccatcgattccccctgcatcacccgacctttaccggctccgcaaataatggtcgcctcacgtccatccggatacacaactttatctccgacccgcgcagaatagtgcccgtcaagggtacttttgccggatgtctcacggatcacgccaccatgacgggtcaggctgccaatcgttgcaccccggaaaatatggagaacagggcgctgtaacattgattccatttctgcgacgagtgactgacgcgactgtggctcaagttctgacagaaactcatcggtaaatggcggctgacgcagccgttccagtacatcagtggtcagttcattggtgtattgctgtgacatggtaaatccttttagtgtatctggttgctcattccgctctgagcgatcatggattagaattgaagttcgatcagtgtttcgcatctgttcgatcaatcgggatgcgttaactttttatagtgcttttaacctgtttttccctcgctttccactaccagcgagcttttcctcatcgacttaccctgcagaaccaccctgcgcgcgttttatacagcagcctgtccaggattacgtctgccgttgtcaggatctccatcagtccatgctgtccactgggaactgattcactacgatggtactgctttggccgtaatggtcttaagtgatctccagcaggcgtttcttcgtcctccaggcccgtgcaagcgcagcgccgccgggcgatacacattagacgccgtacccgcggttgtgccggatggcggcataaatgccttatccggcctacgggccctccagcaggcgtttcttcgtcctccaggcccgcgcaagcgcagcgccgccgtgcgatacacatcagacaccgtacccgcggttgtgccggatggcggcataaatgccttatccggcctgcgggtcctccacaggctcaaacagcgtaggcccgcgcaagcgcagcgccgccgggcgatacacatcagataccgtacccgcggttgtgccggatggcggcataaatgccttatccggcctgcgggtcctccacaggttcaagcagcgtaggcccgtgcaagcgcatggactgcaccccaaaagttggacacccaactgagtaaggtgcaattttatggctaaaccaaagtattcccctgaaacaaaactggctgtggttaatcattatttgtccggtaaagacggagaacagagtacagccgacctttttggtattgaaagaacatctgtccgtcgctgggtcagggcatggcagttccacggtgcagaaggcctgactgcaaaaaataatcattattccgatgaatttaaactcgtggtcgtccgggcggttatcagtgaccgcctgacgatgcgtgaagcggctgcccggtttaatctctccgcagaaatacttgtccggcgctggctcgacgtgtacaacgatgccggagcggaaggtcttttaaacatgcaatgcggacggcccggacaaatgacaaagccaaaaaatatcccaccactgacagataaagagctggaaaaactctcccccgaagaactcagggccgaactgcgttatctgcgggcagagaatgcctatctaaaaaagttgaaagccttggttcagagcgaaaaaaatggcaaaaagccctgataatcagtgaactaaggcatgaacacgctctgcgggaccttctgcgggcggccggtatgtcccgtagcacgtggtattacaatatgaatgcactgaagcaaggggacaggtatgcgggtcttaaagagaacatcaggaagatataccactatcacaaaggtcgttatggctaccgcaggatcacgctcgtactgagaaaacaggggctgcggataaaccataaaacagtgcagcggctgatggcagaactgtcactccggtctgtgataagggcgaaaaaatatcgtgcctggaaagggagaacgggcgaggccgcgcccaatatcctgagccggaacttcggtgcgtcaaaagccaacgaaaaatgggtaacagatgtgacagagttcccggtacagggaaaaaagctttacctgtcgtcagttctcgatctgtttaaccgggaggttatcgcctacagcctgtcggaaaggccggtgatggagatggtgaatacgatgctggacggtgcgttcccgaagctcagaccgggagatgctccgctgctgcactcggatcagggctggcattacaggatgaggagctatcaggaacgtttaaaggcgcatgggatgacgcagagtatgtcgcgtaaaggaaactgcctggataatgcagtgatggaaaacttcttcgggaccctgaaatcggagtgtttttatctgagggagttcaggagtgtcagtgcgctaagaaaagccgtagaggactatatccattactacaacaacgagcggataagcctgaaattaaaaggcctgagtccggtagagtaccgaacccaggctctgagagccgcttaatatgaaccatccaactttatggggtcagtccagcagcgccgccgggcgatacacatcagacgccgtacccgcggttgtgccggatggcggcataaatgccttatccggcctgcgggtcctccacaggttcaaacagcctaggcccgcgcaagcgcagcgccgccgggcagagggtgatagaacggagttcgatgaagagtccggatgcagaaaagcaaaaacccgccttttgggcggtttctttaaatagtggtgcccggactcggactaacgccgcaggcgttgaacagcgcgcttgccgcgctggccccgaaggggtgagccgctgtgcggcgaataatcgaacggagttcgatgaagagtccggatgcagaaaagcaaaaacccgccttttgggcgggttctttaaatagtggtgcccggactcggaatcgaaccaaggacacggggattttcaatcccctgctctaccgactgagctatccgggcaacggggcgcattaaaccgtaatccgcccaccccgtcaaccaaatttcttaaattacttatcgattgcttatctttgcggcaattctgcgttcaaaggcgcgttttggcttaacttcactgcatgccgttatcgccctcgcgggttttccagccgctggtaatggcgataacgtggcgtagtccggagatgagataatcgccaatgacctcctcgtcctcacgcggcgagctcagggtaatttccgcatccacgccgtggcgataggcgccatgatggctgaaaatggtgccgatataacacttcccgttcagccagaccggaatataggccaccgtctcatagatatagttaacggcgacgccgctgtagtagttatccgcctcgtcagcggaggtgcccggcgggatggggcagatcggcgcgtcgttgtcgctggcgggtctgtctttcagcaggctgccctgcattacctccagcgagcgcagcaggtccgctttatcgccgtcgctcaggctgggggtcagcggctggtctttctccggggagcggatgctgttcagcgtatagcgatagcgaaccgtcaccgcgggcgtctggctggtggtgctgaacgggcgtagcaggtagaggttatcttcgccaaactggccgttgtaccacagggcatacacctggccgttgattttgacccagtggttccactggttagccccgcggccattaatggaaaagagggcgccgggcaccccggcatcgaaatcatcaccattatcactgtcgctgccgttgacggcggcaaaatcatcatcacctcgcttgagcaccccggtgtagctgaagagcccggtgccgcccacgtagctgtcgatgatcaggtcgcgtttgccgtcgccgtcgaggtcgataagggtaaagctgactttgccgttttctgaatccgcgctaatcgaggagcgcagaaacgcctgccactcatcatcgctgatatccggggacggtttactggtcgtgatcagcgtatcgtcggcgtaagtgagcgtgaagtcggtaatatggccggttaacggaaactgctcggcgatcttattcagcgacaattctggatcgcttttttgcgctttcaacactgtgttatacaacgtgcgcagagccaggttatccgcctctttctgctgcctggggatcacctggctgacaaaggtcggcagcatccaggtgccacccggggtgatttcccgacacataccggtgctgtacttcaggctgggggtaaaggttttaccatcccaaacgcgcgtctcgccggtgacgcagtcggccatgccccgttctttgtgcaaaaagacgatagcgccgtcggcgtagctggaggcctcggtagtgagcagccgcggtttgctcaactgggcgttatcgaccagccacagagcgtaaccgtcgttatagggcgctcgccagcagagcgcctgcgccagagaatgggttttatccagcgcggtcagcgtgatctggcgatctgccgccggaatggcctgattctgccagtcgtcgcagcgctggttcagcagcggcgtcaggatgggcagcagtttctggcgctgaagcatactcaacggcactggctgcgcgttatggagaaccggggcggcgataatttccggggcgggagtggctggcaaaatggcatcgtcgccggcatcgcctttatccagcagcgcatcggcggtgccggtgcgtcgctgaaacgcatccattttacccagcacctcgcggctgccggcgctggaaagcggcaggtgctggccgttaagggtgaattcgattttgcgctgattcgttaacgcctgtagcagggcggtggtctgatcgctgtcgaggcgaaagtggctgtcgtcgagagcgtccagcgcgccaaaatcccggtcgtcgatcagcaggctggcggtggagtcggcggggatatcgtgctcgatttgcgcaaaggttaccgtggcggtgaggtgctgttcgctgcccgcgttgcgggtcaacagcacgctgacctcacccatgcggacgccgtaacccgccgcccggcaggcgccggtattatcgcaggcgagctcccagtctttttgtgcaaaggaaaaaccttgcaggggagccgccagcaggggcgtagagcagaggcccagccaggcagcccagaagaacgcgcgcatatcaatccctgtcagcaatcagtgagggggaaattataggcgcgacgtggcggttaggatatcagaatcaggtcaaggcgccgcccatacggcactgggcgaagcgtagaatatcttcagccagccgccgggcggtatccacatccgtctggctacgtttgaccagcagacggctcagacagccctcgacaatcagctccatctgcttggcgaccatttccgggtcatccacctccagctgagtcagcagctcgtgagtgtaggccagcgaagcctgcttctgctgttccgccagctggtgaatggggtgctgaggatccgggtagaaggtgcaggcggcgataaacaggcagcccgggtaccgctggttgcttacgcaggtggtgagtgcggcatagcgtgccagcagcttttgctctgcgcttaaggtctcgtccagcaggagctgacgacgccaggcatccacctgctggctcagatagcgaagcgcgtcgtacagcagcgcttcgcggtcaggccagaagcgtttcaggtcgctcgtcgggcaggacacgcgctcagcgaccatctccagcgacgtgttggcgataccttcaatttcaagaatcttaatggcttctgccaggacgtcttcacgtagcacggtgttctcctccatctttcctcctaaagtgtcgctcacgcttgccaatcgcgcaaatgggcgctgaatgccgcggcatccataaagccggtgactcgccgctcagactgttcctgaccctcagcgttaaagaacaggatcgtcggcagacccagcacctgcaggtgtttcagcagcgcgacgtcttgcgggctgttcttcgtcacatcaacctgtaataacacggtgcctttcagcgcctgctgcacgtcaggtgaactaaaggtgtatttttcaaactctttgcaggccacgcaccagtcggcgtaaagatcgagcatcaccggttgacctttcgcctgcgccagcgcctggtcaagctcggccaccgagctgacgcgggtgaaagccaggtgcgcctgctgctcgaccgccggggcgccaaacgcccagtcctgcagaggccgcgcgctgaccagcgcggcggcaagcagaatgatctgtaccagccgcatccacggccgggtagcgcccagcgaggtgataaacgcccagctgaagaaggcgacaccgagcattgaccacagccgtaacccccactggtcgccgagtatgcgttccagcaggaagacgggcagggcaaggatcacaaacccgaaggcggttttcacatggctcatccacgggccgcttttcggcaacaggcgattgccaaacacggtcataaggatcaacggcagacccatgcccagcgcgtaaaggtacagcgtgccgccgcccagccacagattaccgctctgggcgatatacaacagaatggcgcttagcggcgcggtggtgcagggggagcagatcagcccggcaatagcgcccatcgcaaagaccccgccgggcgagccgccctggcgcttattgctgagcagcgtcagccgggtctgcagcgacgacggcagctgcagcgtgaacaggccgaacatggagagcgccagcagtataaacaccgccgacaggccgaccaggacatacgggtgctgcagggccgcctggaactgcagcccggcggcggctaccaccagccccagcgcggtataggtcagggccatcccctggacgtaaataaaggccagcagcagagcgcgcgcggtggaaagccgctgttttccgcccagcacgatgcccgaaatcagcgggtacatcggcagcacgcagggggtgaaggcgataccaatacctatcagcagcgcccacagcgccgtaaagggcaggcgggcaggcgtgtctgcaggcggcactgcggcaggcgcaggtgatgtggcgagctccggggccggtcgcggctcaaccggcagcggcgggttgaacgccggacggctgctcgtcgacggcatgggctcgatggcggttgcctggccgtcgtttgaggccgcccgcacggcgctcagcgggatcactttagtctccggcggataacagaatccggcatcggcgcagccctgccaggtgacggtgagagtagcctctttgtccgcctccttcaccgtcaccggcacggtcaggcgttggcgaaagatctcgcttttgccgtaaaactcatcttcatgccactctcccgccggcagcgccggttcgtcgatcgtcgccccggcggcgctgaaggtaaactgttgacgataaagataataaccatccttgatttgccagctcaggttgacgtcatgctgttgctgctgaaagtcaaaggcgaaagcttgatcagcaggcacgaagttcgagcgccccggcgcgtcgaataacccggcggtggctgatgtgctgcacagcagcaggatcagcgtaatgatgcggtaagccatgagaggtaatcgttgtctccatgcgtgacgggtagaaccagcagttctggggtttgatacgggtggtgtgacttcaggcaatccagcagcgcctgctgatgggcaaggtcagttttgagtagcatctgcacttcatactcctgctcgagtttcccttcccagtaatacagagaggtggctcccggcagcagcgtagcgcaggctgccaccttttccgccagcgcttttgccgccagatcctgggcggtcgcttcgtccggcgcggtacagagcacaacaacagcatcaggcgtagtcatcatgaacctcgtatcagcgaaaagaggcactataacacgcaagatgcggggatattagcgtaacgagcggggaaagtgagggcaacggaaggcgggcccgtagtgggcccgccgccagcggtatttacagcataatcccgccaaagataaagccgaggatcacgcacagcgtgatagcgataacgccggggatcaggaaggcgtggttaaagacatatttaccaatgcgggttgagccggtgtcgtccatctctaccgccgccagcagggttgggtaggtcggcagaacgaacagcgccgagaccgcggcaaacgaggcgatagccgtcagcgggctgacgcccagcagcagcgcggcaggcatcaacgccttggtggtggctgcctgcgagtagagcagcgtggcggcgaaaaacagtaccaccgccagcagccatgggtaattatgcagcagatcgccggccacggcctggatgtcgctgatatgcgctttaacgaaggtatctcccagccaggcgacgccgaggacgcagacgcaggcgctcatcccggacttaaaggtgctggcgttgagcacttcgccggtgtcgattttacaggtgatgctaatcagggtggcgatggtcagcataaataccacgatcgcctcgttacgcggcagcaccgggttcttaatcaggccgacggtatcgctgatggccgtggcgtagaacatcaccgccacgatgccgatcaaaaacagcagaacggaacgtttggcgtgcggctgcagctcaaatacctggctgccgcgcagtctgacttcccccttggccagccgctcctggtaaaccggatcgtctttcagttcgcagccgaggaagttgcagacgatagcggtgagcatcaccgccagcagcgtgaccggaatacagatggccagcagcgtcaaatagctaacgcccagcggttcaaggatacctgcgaaaaagaccactgcggcggaaatgggcgaggcggtgatcgctatctgggaggccaccaccgcaatcgacagtggacgagacggacgaatgccttgctctttggcaacttcggtgatcaccggcagcgtggagaaggcggtatggccggtgccagcgagcacggtcataaaccaggtcaccagcggggcaaggaaggtaatgtacttcgggtggcggcgcagcatccgttcggcgaggctgaccaggtaatccatcccgccggcgacctgcatggcggcgatagcggcaatcaccgccataatgatttcaataacgtcgaaggggatcgcacccggtttaatttgaaaaataagcgtcaggacaaggacgccaaggccaccggcaaagccgataccgatgccgccgagccgggcgccgagataaatcgccagcaggacaataaccagttctgcaccaaacatatatgccttccttgttttttaacaagttgatattgaattgttgtattttagtaaaaccaaaaagcaaaaaaggcatgtcatcgctgacatgcctttgaatgactaacctgaaagattactgttcgctttcatcggtataacgctttgctttataagcgggatgcatcaggttttgcgcagagaaaatatcatccaactccgccgccgtcagcagtccgcgctccagcaccacttcccgtacgctcttgccggtttcggcacagatcttgccgacgatatcgccattgtggtggccgataaacgggttgaggtaggtgacgatgccgatggagttgtagacgtagccttcacataccgctttattggcggtgatgccgttaacgcatttctccagcaggttgtagcaggcgttggtcaggatatgaatcgactcgaacatcgcctggccgatcaccggctccatcacgttcaactgcagctgaccggcttcggaggccatggtcacagtggtatcgttgccgataactttgaagcagacctggttgaccacctccggcaccaccgggttaaccttcgccggcatgattgaagagccagcctgcagctcaggcaggttgatttcgttgaggcccgcgcgcggaccggaagagagcaggcgcaggtcgttacagatcttggacagtttcaccgccaggcgtttcagcgaactgtgaaccataacgtacgccccgcagtccgaagtggcttcaatcagatcttccgccgggacgaccggtaagttgcttacttcagccagcttctgcaccgccagctgttgatagccgtccggggtgttgaggcgagtaccaatggcggtggcgccgaggttcacctccagcagcagctccgcagtgcgcaaaatgcttttggtctcttcattaagcagcacattgaaggcatggaactcctggccgagggtcatcggcaccgcgtcctgcagctgggtgcggcccattttgaggatgtcctggaactcctcggctttcgcctggaagccttcgcccagctgtttaatcgcatcgattaacttaaggatggaagcatacaccgcaatgcggaacccggtggggtaagcatcgttggtggactggcatttgttgacgtgatcgtttgggttcaggtactggtattcgcctttctggtggcccatcagctcaaggccaatgttcgccaggacttcgttggtgttcatgtttacggaggtaccggccccgccctggaagacatcgaccgggaactggtccatgcatttgccgttattcaggacttcgtcacaggcggcgataatcgcatttgccgcgcttttgggaatggtctgcagctccttgttcgccagcgcggcggctttcttcaccatgaccatgccgcgcacgaattctggtatgtcgctgattttgctgttgctaatgtagaagttttcaatcgctcgcagagtatgaacgccgtagtaagcgtccgcgggaacttccctggtgcccaacagatcttcttcgatacgaatgttgtttaacatgtgaaccttcttttcaagctgccaatgaattcaccaaacacacagaatatccagtattcagtatattttctggccgacgattatttccttaaccggcccggtgcccaagatcatatgctgatgatagcgaatatcagtaagcttgatcacttattacattgcgggtatgagaagatttattaatctgtgaaatgggtcaccgctttcttattcctgagaaaaataagcctttccgctgattgaaaagccgctcagcatccccatgttagtgggatgcgatcagcaaattgatgattacgggcgctgaacgcagcgcccgttgatgaaggagacgccggtgcgttggattccgtttattgccttttttctttacgtttacattgagatatcgatctttatccaggttgcgcacgtgctgggcgtctttatgaccctgatcctggtgatctttagctcggtggtagggatgtcgctggtgcgtaaccagggcttcaaaaacttcctgctgatgcagcagaagatggccgcaggcgagagcccggcggcggagatgatcaagagcgtatcgctgattatcgctggtttgctgctgttgctcccggggttctttaccgacttcctcggcctgctgctattgctgccgccggtgcaaaagcatttgacgatgaagctgatgccgcacctgcgcttcagccggatgccgggcggcggctttagcgccggaactggcggcggagagaccttcgaaggggaattccagcgcaaagatgagcagcgcgaccgtctggaccataaggacgatcgccgcgattaacattccccggcccggtcagcagatgcgaccgggccgctttctttgcaggcctacacgcttcccgtcgccagcttgcgcctgggtaaaaacagccacagccccgccagcatcaccagcgcgtacaggcttttccagccgaccatcgccagcagcagcagacagagaatgctacccaccaccgccaatagccgatagcgaccgcgcagcaaacgacaacccgccagcatgcacagcagatagatcatgatgaaaatgccattggcgtaaacgatcagcgcgtccagattgatatcgagcagatagatgccaagggtgctaactacgcaggatcccagcacggcgttgagggcgttgcgcgggatctgacgtggcgacagccttgcgaggtagctgtgtggcttatgctgcgcttgcgaccagaccaggcgggcaaagctttgaatatagatgttgaggctggcgaaacaggcgagatagccgatgacgcaggctacccacagcgcttcgacgccgaacagacggaccacgatattcggtaatgacgccgccgccgctatctcctcgccaaaggcgtggaagtgcagcaccagcacggtgcaggcccagtagaccgagccggcaagcagcaggcctatcatcagcgccctggggaaatcacgctcgggatgtttaaactccgaggcgagatgcgcgaaggcttccagaccgacaaagcaccagaacatcaccgacagcgccgaaaagagctgcccgcggtcaatctccgccggggccgggaaggggatctgcgccgggcttatcccgccgcgccaccagactacgacgatcagcgccacaatcagtacggcaaccaacgtctgcaggttagcgctggagctggcgccacgcgaaccgacccaccagacgatggccagggtgcccagctccgccagcagcagctgcgcatcatgccagccgaacagcgcctggccaaaaccggtggcgatgtgcagggcggcggggagtccgaccgggataaccgataaaaacagccagccggttacgctggccagacgtggcccaaaggccatatcgacaaagtgggccacgccgcccgcgctgggaaaatggcggcccagcagggcgaagacgatggcaatcgggaaaacaaggagaatgagcagcggccatgcccacaggctgttatcgccagcgaccagcgccgccagcgccgggacggcgaagacgccggtacccagcaatgaggtggaaagcaacccaactccctgtcccagccctaactcctgttttaaaccactcatgattcaatcctgcgccagtgaaaaaaaagagagtatcacaatcgcttttccttatgaccgattgcctgacatggccgctttttgtgcgccagcgcaaaggtaaaaattttttttaattttgcccttgaagccggaaatggccatccccatctctctctgcactagccggtaaaccgcgttcggcccggcgtcacccataactgataatgactttctcgaaggagagctatcaatgagtattcgtccgttacatgatcgtgtgatcgtcaaacgtaaagaagttgaaaccaaatctgcgggcggcatcgttctgaccggttctgcagcagctaagtcaactcgtggcgaaatcatcgctgtcggtaaaggccgcatcctggaaaacgggaccgtgcagccgctggacgttaaagttggtgacatcgtgattttcaacgatggctacggcgtgaagactgaaaagatcgacaacgaagaagtactgatcatgcccgaaagcgacatcctggcaattgttgaagcttaattcgcacgaccctgaacgaatttgaggaataaaagaaatggcagcaaaagacgtaaaattcggtaacgacgctcgtgtaaaaatgctgcgcggcgtaaacgtactggcagatgcagttaaagtgaccctgggcccgaaaggccgtaacgtggttctggacaaatccttcggcgcgccgaccatcaccaaagatggtgtttccgttgcacgtgaaatcgaactggaagacaagttcgaaaacatgggcgcgcagatggtgaaagaagttgcctctaaagcgaacgacgcggcaggcgacggtaccaccaccgcaaccgtactggctcaggctatcgtgaacgaaggcctgaaagctgttgctgcaggcatgaacccgatggatctgaaacgcggtatcgacaaagcggtactggctgcagtagaagagctgaaagcgctgtccgttccgtgctctgactccaaagctatcgctcaggtaggtaccatctccgctaactccgacgaaaccgtcggtaaactgatcgcggaagcgatggataaagttggtaaagaaggcgtgatcaccgttgaagacggtaccggtctggaagacgaactggacgtagttgaaggtatgcagttcgaccgcggctacctgtctccgtacttcatcaacaagccggacaccggtgccgttgagctggaaagcccgttcatcctgctggctgacaaaaaaatctccaacatccgcgaaatgctgccggttctggaagccgtagcgaaagctggcaaaccgctggtcatcatcgctgaagacgttgaaggcgaagcgctggcgaccctggtggttaacaccatgcgcggcatcgttaaagtggctgcggtgaaagcaccgggcttcggcgaccgtcgtaaagctatgctgcaggacatcgctactctgactggcggtaccgttatctctgaagagatcggtatggagctggaaaaagcgactctggaagacctgggccaggcgaaacgcgtggttatcaacaaagacaccaccaccatcatcgatggcgttggcgaagaatccgcaatccagggccgtgttgctcagatccgtaagcagatcgaagaagcgacctccgactacgatcgtgaaaaactgcaggaacgtgtcgctaaactggctggcggcgtagcagtaatcaaagtcggtgcggctaccgaagttgaaatgaaagagaaaaaagcacgcgtcgacgacgccctgcacgcaacccgtgctgcggttgaagaaggcgtggtggctggcggcggcgtagcgctggttcgcgttgcggcgaaactcgctggcctgaccggtcagaacgaagatcagaacgtcggtatcaaagttgcgctgcgcgcaatggaagcgccgctgcgtcagatcgtgtccaacgccggcgaagagccgtctgttgtggctaacaacgtgaaagctggcgacggtaactacggttacaacgcagcaactgaagaatacggcaacatgatcgacttcggtatcctggacccaaccaaagtcacccgttctgcactgcagtacgcggcttccgtggctggcctgatgattaccaccgagtgcatggtgaccgacctgccgaaaggcgacgcgcctgacttaggtgctgctggcggtatgggcggcatgggcggtatgggcggcatgatgtaatcgtgcgctctacggcataaaaaagcagaaacccctggccagcaatggctgggggtttttcttttggcgcgctttttagtataaggcttatacataaaaatcatttaagctgcatcagagcggcaagcacctctgtttcgggcgtgaactgacaagcgcgaccggggaggaaatgaacgcggctcatgccgacgcagtttgaaggatgacagatttacatccgggccagtgcgtccagctcatcgatcatggggaataacatgcaggtaaaatatttagcagggattgtcggcgcagccttactgttggcaggttgcagttccagcaatgaattaacctctgccggccagaatgtgcgcttcgtgcaggagaagccgggcgcagagtgtcagctgttagggaccgcgacgggtaaacagagcaactggctctccggccagaatggcgatgagggtggttccatgcgcggtgcggcaaacgccctgcgcaaccaggcggcagcgatgggcggcaacgtgatttacggcgtcagcagcccgacgcaaaacctgctgtcgagctttgtgcctaccgacagcgaaatgaacggccaggtttataagtgcccgaactgatgcgtgacgcctctctccgcgagcgcagagagaggcgtggtcgttagatgaggatcaggcgctaagctccgctttcttttcaaggtagaaggcgtgtaggggacgcaggcattcttccagactgagcattcttcccggctgggaagggatgatagtgctgaagatctggcatggcgccagctccgcgtgcatcgccttgagcttggggcttttctcgataatccgcgtcacaacgttgttttccagttccgacaaatgcggcgcgctggttttcaccaccgccccggagacaattttcttgccttcgtctgtctcgcagcagtacagcacgcccagataatgggaaaacaggtttagcttccagtcttcctggggatactgctggtaatcgatattgggctgagtggttaagtcgacggtatagcacattaaaaaatccatatttgaacttaaatactgaaccagttcctggtcgccgactgtttttaatgcttgttgaataccgataattaatgcttcgatttgcagatcgtcaatacataaagtactaatttgttcatcctgaaatacaagaattaacgttgactgtgtttcgccaggtttgagcgtaatggacatgattcgccgctcaggggatggttgctgtatttcagccgtctcaacctgaggaatattggcaacaagtgcctcattatacgtgataagctcatctttataggcctctccctggttttcaagccgctggaaaatcacagccattctgctctgcagtatcaggagcagatcagctagcaccggtgcctgaagatagtaaatctcgcaaaagccattttccttcttaactttcagcagcaacgctaaaaatcgctcttcaaaggtaattcctgcggtattaaaacctataaacgttccttgcatattcttctcctttattaagcagtagtcaccgacttcgattgtgagagatcgataacacgatcggcggatgcaatggtcgatggtcgatgcgcgacgataatgcgggtgatacttagcgctgaaatagactgattgataaccgactcatttctgaggtcaagatggctggtagcctcatccatgaataaaatactcggtttgcgatacagtgcgcgggcgatcaggatacgctgcttttgcccacctgaaatacccagcccaagttcgccgacaatggtttcgtatcccatagccatcttcataatttcatcatgaatgttgcaccgtctggcacactccatcacaaaatcaagatcggcgctatcatcgaagccacttatattatcaataagggagccggaaaagagacggtcttcctggagtacgcaggcgataccaagacgatagttattcaaaccaatctttttaatctccagattatccgccagtatttcgccggaatccggcgagagcagtccgcacataacttttaatagtgtggttttccctacgccagatgggccaattaacgcaactgattctccaggagcaacggttatgttcaaatttgtaaagatgggttgtgaaaaaggatcgtattgataactaagatttctcacttcaagttttacgccagtgttttccgtaaaaacacgccgcgatggaagttctttttctggttcactaaatgctatttctgatagacgttcgttgtgcagtgagagcatacgaagctgcatcaccaaatcaatgagattcgatgcacgttgagaaaactgaccccgataggcgttaaatgccataaacataccgagcgtcatctcattatcaattaccataatggcacccaaccacagtaccactacctgatcgattgaggtgataaaggtattaatgccaccaaacatcatatcgaatcgagtttgctttatacctgcattgctggcgtcaacgttaagattcagccaatgctgtgagcgacgttcttttaaattcagtgctttgatcgtagaaatgccataaagtgactccataaagtgggagttagcacgtgcgcctttgacgacctgttcttccgttacgcgacgataaaagctataggtagcaaagcgcataatcgcatagcaaatggtaaagccgatgacgacccagactaaccaaccaccatataaggtcagcatcaccaataaaccgattgtcattatcgagtcgatgatgccggtaacgatactattggtaaatattgagcgaatcgtatccaaagacgagaagcgagactgaatatcacctaaatgccttttctcaaaaaaggataatggcaaacttgtcagatgatcgaataacgtcgttttccattgaatatttgtcagggtatttaacgttaacgacgtccatgcacgtagcatgctaataaacgtgcggaatagggtaaaaaatatcaacccgatacagataacagacagtaagctttggtcgtgagccataatcacatggtcagtgactagctgtgtaccaatcggtaacaggagtccgatagcttctaccactacagagtaagcaaagatcttaatcagtgctgattttaaaccaacaattttatgcattaaatccagcaatcgtaatcgggattttgcttcttcttgctggaagttatgatcgggccaaagttcaagcgctacaccggtaaaattgtttgacatctcattgatgccaatgattcttttacccaacgccggatcgtgaataacaaatgcgtttttccttacctttgtaagaacaacgtagtggttcatcccccagtggatgatgcaggggagtttaagctgctttatttcatcaaggtcaagagctaacgcccggctttttaagccggcatgctctgcagttttgcttagagacattagtgaggagccctgggaggggctaccaaaccgctgacggaaattaaacagatcgatattcaacccataaaaaccacagaccattgccagacaggcaattccacattctgatgattctgactgaagaataacgggcgttttgttaacaagagaaaaatttaactttgcaacaacagttttgaaaagttcgttagtcatggatcggcccagtaatgctttgagttatcttatacacaggggtaaacatccacatatagagcggacgctcttccaggaatacaacagcttgagccttgaggccatttgaaagcgaaagcgttttaccattatattcaaaggttttgttttcaattttcacaatggtcttatagagcgccagttcctgctggtttgtgccgttcgtaacattggtatactcagacatttcttgtcgagatgtgggaacagaagatattgaaagtatttttcccgggaattgaccaaatttatctgatgggaatgcagcataacgaatgttaatttcatccccaggttttacataaggtatactattgttaggtaaccataaaataagataatactctatatcaccggtaggttttatctgtgctagactgctgcctttatcaaccatttggcctttagtgacggtcaatgattcaatacggccttcagtcgttgctttaataataatgttaccgtttgcgtttgattcaaccagttgatttttataatcattaatctggttttcttgtgacgagatttgattgtcaaaatcagctatttttgtaattttatcactattgagctgagtgacctgcgattccagttgcattttctgactcaccagagactggtaagtgctttgttgttgaaaatacaaagagtgttgatagttatattggtctttggtaatcagtccgtcacttaaatacttatcatagctggatagattatcatgcattttctttaatccagcctgggcgttagccaacatgcgattagtttcttttaacgaatcattgattgtttttaactgcttctctaaagaaatggttgtttcttctttattatgattcagttttgaaatgatatcttcagcatttgcgatcttttcattaatgacctctatttgtaccgcactaacattacccgttgtggtgttccgggaaatgtcgatctcatataacggctggcctttggtcacaatatcgccgacttttacatattgggagataacaaagccttgctgcggggcataaacgttgacagagtgaggtagagtaatgacctctccctgaacgtcgattctctgggtaaaggagcaaaatactgtggtggctatcaggatcgcaagaaaagcaaaagagagtaatgcaacaagccatgctggaagccctgcgagcagcagtgcctttcctttccagtgatgctttttatactcaatcgcttccttgcgatagattttttttaacatagttatcgcttaaattataaaatgaaaaggcccgatacgtcaggccttaattactaatgaatgcttgtcaacaaactgttgagctaatcattggcgcgtaaacttagttgctccagaagttcagggtgccgtcataaatagcatccattacgccctgagcataatccagagtcatatcccagccaacgatacccgctgcaataccaaagcaaacgccaccgagaataaccccggcgatcatccctacaccctggccgattgagccgataccgaagataccgccacttacgccaccccaacgtccggcgtacgctgtaccaaaaatagcgcccagagaggcgcccagtgcgatagcgccaacttcttttgcggcccaggtgacgatatcggtaagagtatcggtcagcgcaccgccagaaatttcttccatttcaaatacagttaattggtgcatgattagtcctttaactaaaattaaaattatatattcattccagaccagaatttggtccgcagaaaagatagtcgttgctgtagtatgaatcaactcaactaaatatgaattgttgatgaaattagaggttaatagtgaatcaaatctaaactatttataggttcataaaacagtaactaattcagcaggtggtggcacgcagctattatcgatgtgctgcagatatattgatttattcttgcattcatatatgacatttttttggttgttgacataaaaatacaaaaggtggatatcattatccaccttttgtaggggtatggaggttatacttttactcttcctgtatgacaacttcaagcatagcttttacatgaccggaagagacttcagcgctattgtcactcatgcgataatagtcggcggtgaaggtaaagttttgtgatgcctgtgccttggcgaagctataagtttcggcgtcgtaaaatattataggcttgttgtcaattttgaagataacgccaacgttatttgcggcttcggttccagttatcatgttatcgatgatcccatccccggcagaactggtgccattaacagggttaaaccagtagtaaagcttgttgccaactgaaccttgtgggcaagtcacatccattttgatagttttttgtgatggagttgtacctcctcgagaaatggacattaatgtgtttttttcaattttattcagggtgatttggctaggccctgatactgaaatatcgcaagaggtatctttatatgaaatagtcttgaacttcagggttgctgttaacaaaaggcggtcagctgcccttgggttggtgcttaagttacctgctgagaatttaaataccgggtttgtactggtgccggatgtatcgatgacctgctttgttttaattaaccataccgtcataaatttataatcttcattcgattctaaaataggtacgattgtagattgagcaacagcaggattaatagaaccatttttgctgctcagaagatctgaaaactgaaagccaattccatctatgccggtttcatagactggtttgccccttatacccgtgacgccggtaacttccggtgctgttgattcaacaatatactggtctcccattattttgctgcactcaaatgttttataatgtccggtaccgacttttttagtatagaggactgtacccaccggaattgttgggtctgttgcgattttaggacttatgttaaacattgcttgtccagcggaaccagaataatcgcatttggcaattacctcgctacaacagcatagtagggataaaaaaagaagtatttttctcattctttattgttccttggtcaatattagcgacaaaccgtttcgatttgactgatgccagacgctttgccttccctggctggtaaagtaaaggaagcattgcactgctgcgcggcgcttttgccccactggacgttaaggatcccggtctgctgcaacccggacatatagaccataccggcgtcgctgacgatgcttggctgcgatttgctgtcgccggcgagtagaaccatcgcgccataaggcacgtcctgaccgctggcggttttcagatgcacaaaggccctctggccgatattgccgtcataattagcacgcacgatggcaccacgggtcggcacgacgctttgcgtagtttctggaagctccatatcttcacccagtgaagtgctgtcaagggtgatgtcggtacgacggtaaggtgtaacgtacgggacgatagcgtaaccgcgatagtcggtggagatggtgttatcgttggtcaacttgacgttatccaggcccggcgctttaaccagcacggcggcgtcagtgatgtcctggccaagtgtaatgccatcggcatgagcgacgatgctgccgttggcgccgtagtcaatacgttggctgttattgtcatagctatagccggcattaaggctgccgcgggcaccgttataggtcccacgcatatcgcctctgtaatattcccggttgctgtacccttgctgcaggctccattccaggctgtcgttatctagcccgacgccaccaatggagaccgactgatcggtagatcccggattgctgttggttaattgatagctggtataggtacccggcagccagttgctcagcggtagcgtcaccgtcagggtgatgcgccgatcgtcctgggcatccttacctgagttatttccgctccaggtgtagcggttatagctgtagcccagatagtagttcacattacggaaaccgccgttgtaacctacgctaattgacttgttggttcgcttatcgtcccagtaatcttcaatcaacccgcttatcgacaggctaccgaggcctttacccaggctttggttaaccgtcaggttggtgcgattgcgcagtgagcgagaggtataattaccgtcattagagtagctatccagcacctccgagagggtattaaagccgcgggtggaatagcggtagcccgcgatggtgacattggtgccagtttcgacaatgtttttaccataacggacccgccaggactgtcctgaggtcttttcatcgtctttctttttcgaccatgcctgggtgacgtctgccgaggcggcgccaagctcgcccaggttatagccgaggcccgtcgacagcgcctggtagcgcgaggccgcctgcataccgccataaagcgtcaggctgctggagacgccataggtcgcggtggcctgagtaaatggcgtttcatcgactccaccatcgtaaggacgatatttaccggaagtaatctcatactccagttgattttcacgcaccatgaccggtagggtggcgaacggcacaacaaattcttgcttggatccgtcggactcttccacgctgacgtaaaggtcgccgctaccgccgctcgggtacatatcggtgatttcaaatgccccgggtgccacgtaggtctggtaaacctggtagccgttctgtttaatgacgacgcgggcgttggttttggcgataccgcgaataatcggcgcatagccgcgcatactttccggcaacatcgtggtatcggtggccagctgaataccggtaaacggcacgctgtcgaagatggttgagagcgatgaactttcgcccatcaccaggttactgttgatcgagcgaatacttcgctgcatatagagataggcggagtcccagtccccggcatcgctattgtttttattccatgtgctgaggttgcggatacgccatgggccaacgttgaggccagactgcaggttcaagctgtagtattcatcattggcctgcatgtcgttcgagccgctgaactggtagttcaccagcagggcgttgatgccatcatcaaactgatccggtgggatatatccctgcgcggtggtggataaggccgcctgcggaatagaaatatttaagcgctgggcggtaaagtcaaaatccgctttggtgtccggaatgacagaaaagtttgcacagccgttttgatcctcggctaactctggaaaggattttatccttacgccatattccgcgagagcttttagactcaggcagggaaccagagcgggttcgcggttatcgctgctggcgcgattgttggcgacaaactttatcgtcctggtatccaggtagcggccattaaacatgatatcgacccgataatcccccggcgcctgcgcgttctgggtctgaaatacggataagtcaggagtggttgatggatcgctaccattcaatgagctaatgaatgagggatcgaaaaagtcacgtgcttgcgctttattattcaaaccagaaagcaatgccggaagcattgcaaagaagatggtggatagtttgaataatccattattcttatttggcatagacacatccctataatgataaaataaatttcttattacagcgatgaggagtagagcgacccagctccgccataatcattgacaactttccaggtaatgctggaggcattaatattttcttttaacgtcacttcttttgtcgtcatcggggcgaccgagttgacttccggcttcacttctttgctgccaatctggatgctatggaaatagaagaaaaagggcgttggatttttgatcgtcagcttagtgccagactttcgccattcgagctttttcgcttccgtattaggggagaggtcgaaaagtgctttaggacgatagaccagacgcatacggtgacggactgctagttgaatggtgttgttattcgctttggcatcatctgccggaggaatcgccatcacgttaaaatagtacatggattcccggtcggtcggcgcattaacgtttccgttagaaaacagacgaaccgtattctgttgtttcccttcaaggcggaacagcggcggcgtggccataaaagagggcgcttttcctgccggcgcttcaacccaggatttaatcagatagggaatatcatctttattttctatttgcgccgtgatttcacgtgcgccttctttatacagatagcgggtggatcccactacaataccggcatgggcaatactgctgaggagtaatgcacaggaagcggtgaaagttaataaagtcctgaacatgttttttctctgaatgcaaaaaagggcccgccgtgaagcggggccctttggggaaaaattagatggtgtaatcgatagtaaaggtcgcaacacctttaaccgggccttcggtgaccggagtagcagagttcacttttacataaccagtggtgtacttcagctgagtaccggtagtagcagagtagctttcggtcatggtgtcagaaccgtcgaaggctacgcgatgtgaatcgctgagacgctggataccgataccgataccggtagcgccgccagctgcggtgttgtccaggatggttttatcgctggaggtgacaccggcaacgtttacagtcaggccggtaaccgggttagcgctgccctgtgcgcagtcagtaactttaaaaccgaagtcctgagttttgaacagagtacctgcagcttcagcatttgcttccgcagtggtcacagtgatcagctgaacgataccgttgttcagggtaccagtcggagtcacgacgcaagagttagctgcatcagagacttcacccaggacagttacctgagcggtgttggttgccattgcctgagcactcagcactgcagatgcagcgaccattacagctacgattgtctttttcatttaattaatccatatatagatacttagtcctgtgtagagttgataacagttatcaagggaatggagtatgcattcgcattgatattgaaaataagcgccagcattcctttatatagtgctgagaccaatcatcctgttgaacaacgctaccatatcgcttgccatagcgaaccatggagaagcgggagtaatttaaaagtctggtgcaaaaaatgcttgtgaattgttgatgaagcacctgtgaatttaatgctgccccccctctctgatgagatgtggattccagttgagattaatttaatctgaaaatctgaccattaagcaagttagctatcgcttgtttttttatctgcggtatcctgtgggctgaacttcaatgtgaaatgtacctgttttcatctgaaacaagaatgttcacataatcgtttggttgaaatcatttgattttattatggataatagggttacgtggggcaaggatatggatgacgcagtattatttaatgggtgtataattaatcaggagattatatttaatgccaatatgaatgagctgcggccgcttgccggggacggggagtgcatcagcctcaatgcgccaaccgccagatgcttgctgctgcttttgcagaattgcgacaaagtcatttcacgggatgagttcctggcggctgtatgggaaacacggggggtggtcgtttcgcaaaatacgttctatcaaaatatctctttgctgcgaaaatcgctggtaaaagctgggctatctgaggatatcattatcaccgtccggcaaaaaggctttagcgtcgctccgaatacattggtcattcctctctctgatgaagagtgcaagaatatgaatcgggtgacattaacgcattatcagaataataaagttgtcgactttatttctgaagaaaaggaaaagcctgacactcatttaaatcttccactaatagaaaacttatcaaagcatggcagtgatttgatggcaaataaaccggaagaaggtgaaaaagcatctgagcggttgcatgttacttttaaaatacccgtatggttaatcgcgctaattgtcgtgatgattgtaattaatattattgtgttggtcgtgctaaaccggtagctcgtcacagccaggggttatagcgcggtgcgatagtcatttgctggtcaccttaacacccgtctgtcgaaatcttcctatccgaaggtctgccagaacgtcctggcagaccttcagtttattaacgctgcttcagccctaaatccagcggcgtcttgctgggttccccgccaatctcgcgcgccagcttcggcaccatatagccagagatgagggtcaatagttcgcgcatgatttcacgggcttcatcatcgctgaccatgaagtgcgccgctccctgcacccgatccagcacgtgcaggtagtagggcattaccccggcgtcgaacagcgcattactgaggtcggccagggtttgcgcgttgtcgttcaccccgcgcagcagcacgctctggttgagcaacgtgacgcccgcctgacgcagcatggccatcgccgcgcgaaactcaccgtcaatttcattggcgtgattgacgtggttaaccaggattacctgcagcgacgaacgctggaagcgactggccagcgtctcggtgatgcgcgccgggatcacaatcggcaggcggctgtgaatacgcagacgcttaacgtgcggaatagcttccagctgggtcattagccagtcaagctcatggtcctttgccattagcgggtcgccgccggagaagatgatttcatcaagctgcggatgcgccgcgatgtagtccatcgccgtttgccagttgcgcctggtgccctgattttcggcataagggaagtggcggcggaaacaataacggcaattgactgcacaaccgcctttcaccagcagcagtgcccggttgcgatatttgtgcaacagaccgggcaccacgctgtgctgttcttccagcggatcggtggagtagccgggggcgacgataaactcttcctcggcggtaagtacctgacgaagcagcggatcgttagggttgcctttctccatgcgggcgataaacgcgcgcgggacgcgcagcgggaacaggcgtctggcctcgcgtccggccagcagtttttcatcagcgtctacatttaaaagacgcagcagttcatcaggactggtcacaacattggcaagttgcgttatccaatcttctctggatggggtatttagggttacaatatgcgccattttgtggcttagctaccagttaaacaatttcagagggccttatggcgacttactatagcaacgattttcgtgctggtcttaaaatcatgttagatggcgaaccttatgcggtagaagccagcgaattcgttaaaccaggtaaaggccaggcgtttgcgcgcgttaagctgcgccgtctgctgaccggtacccgcgttgagaaaaccttcaaatctaccgattccgcagaaggcgcggacgttgtcgatatgaacctgacttacctgtacaacgacggtgagttctggcacttcatgaacaacgaaaccttcgagcagctgtctgctgacgcgaaagcgatcggtgataacgctaaatggctgctggatcaggctgagtgcatcgtgaccctgtggaacggccagccgatcgcggtcaccccgccgaacttcgttgagctggaaatcattgaaaccgatccaggcctgaaaggcgacaccgcgggtaccggcggtaaaccggcgaccctgtctactggcgcggtggttaaagttccgctgttcgttcagatcggcgaagtgatcaaagtggatactcgctctggcgaatatgtatcccgcgtgaagtaatttcgcgtcatgatgaccggcgtagcctccgtgctgcgccgctcttttcgtacaggcacaacgagcacgatacatgaagcgcagcgttaaactcctggtgttactctttctgagcagcgcactgttggctggctgcaataccgcccgcggtgtgggtgaagatattcagggcctgggccacgctatctctcacgctgtgagctgaatttccctgccgtttcgttaatggcgcttgcctcccggtatgtcagcctcctccacgcatactccttttctcttaaaaatcgcaaagatcccttcatctttggacggtttgtctatgcttatagggcatgaaaacaaaactgacactaaggatgacattatggtgaaaaaaacgattgcagcgttctttacggttttggtcctctcttcagcactgaccgcttgtaacaccacgcgcggtgtcggtgaggatatttcagacggcggcaacgcaatctctggcgcggcaaccaaagctcagcaataaacgccgtcaacggtacggtttagcgccgtaccgttcttcacttctctcattccgttggatatactcaccacgacttttcatccaccttacgggacgacccgtaagcgtttctcatccggggacggccccagcaaaggagccttatgtcctggatagtcttgtttatcgctggtctgctggaagtggtgtgggccgtcggcctgaaatatacccatggctttagccgcctggttcccagcgttatcaccatcgtggcgatggtggccagcatggcgctgctctcatgggcgatgaaaaccctaccggtaggtaccgcctacgccgtctggaccgggatcggcgccgtgggcgccgccgtgaccggtattgtgctgttaggggaatccgccagcgccatgcgtatcgccagccttgtctgtatcgtgattggcatcattggcctgaagatcagcgcgcactaatcatagcgctgattgacccagaccagtttgccgacatcaaagccctgtcgggtggcaatgtccagcatctgctgcctgacctccggggcgatggtcggcgcccgggccagcagccagagatagtcgcgatcggggccgcagaccagcgcgtaacgatactccttatccagagcaatgacgttatagctgccgtagaaagggccgaagaaggaaatcttcagcgcggcgcggctgggctccccggtaaagtacgctaccccgtccgttttctgccacatgccgcggtcggggttataacctttattcaccacatccagaccgccgtcatcacgtgggtgccaggcgatcgtgaccttttccagaccgctttcaaaagggtggtcaaagcgggcgatttcataccaggtacccagatagcgctgaacgtcgaagggactgaccacggtgacgcccggcggcggggcgggcgtgctgcaggcgacagacaggaacgagacggcaatcgcggtgattatcggcaggatacgcatggcatgctccttgctggcttttaagctaagtgtagagtccagcagggaaaaggcggcaagatttttctatgaagcgagcccggtagcagaaatgcgaccgggctcttgcaggatcagataaacagtacgccaacgagggtgatgacgctgaggattgccgccaggccgtagaagacccatttaccgtttggcacatggattttcagatcgtgcatggcgtggtgaatacgatgcaacccacaccacagcggcaggacaatcatcagaaagatgaatgcgcggccgataaagctttgggcaaaggccagcacacgctcatagctaaaggcgtcggccggggcgagccccagcggcagcaggatgccgaccagcagcaccatcaccggcgcgacgatcgcgccccacatgccgcctgcgccaaacagcccccagaatacgggttcatcggaacgtttcggattgggattaatcatctcagcctccttaccagaacagggcgacaaacaggatcaccacggtgaccaccgccgtcaccacccagagccctttaatgaccggctctggccccattttttcgcctttgatgatgacgttggcggctttcggcgccagctcaaaccaggttttggtgtgcagcagcgctgccgccagagtaatcaggttgaggatcaccaccaccgggttttgcaggaatccgatatatcccgcccagctatcggcgccgtgcttgagggcaaacagcccataaatcagcacaatgctaaaccataccgtcggtaccgccgtgccttcccgtaccatgtagaagcgataaaacggcagctttttccaccaggtggaggtcattggtcgcacgtagggtttgcgtttcgtcgtcataatgcactccttagcgtggtttcagggtggcgataagaaagtctttcgagctttccaccttgccctgctggatcgcggccgccgggtcgacgtgcttcggacacacttccgagcagtagcccacgaaagtgcaggtccagacgccattctggccgttaagctgcgccatgcgttcctttttaccgtggtcgcggctgtcttcgttatagcggtgggctagggtgatcgccgccgggccgataaattccgggttcaggccgaactgtggacaggcggcatagcacagcccgcagttgatgcagccggaaaactgatggtatttcgccatctgggccggggtctgcttgtttggcccctggtcaggcgtgcggttattgccgatgatatacggcttaatggcttccaggctttcgataaagtgggtcatgtccaccaccagatcgcgctcgatcgggaagttggccaatgcctccaccttgatgcctttggtgtaatcgcgcaggaaggttttgcaggccagcttcggcaccttgttgaccatcatgccgcaggaaccgcagattgccattcggcaggaccagcggtagctcaggtctggcgccaggttgtctttgatgtagcccagcgcgtccagcagcgaggtctgttcatcgtaaggcacgtcatagaatgcgctgtgcggtgcggtgtcgacctccggattgtagcgcaccacttcgactttcaggtttttcatctcagccatgggtggtctccttcttctcagccgcgtccgcttctgcgccatagacacgttttgccggcggcagcgtggtgatcttcacatcgccatattccagacgggtagtgccatcggcctcgcggaaggcgagagtgtgcttgaggaagttgacgtcgtcgcgttcggtacagccttcatccaaacgctggtgcgccccgcgcgattctttacgggcgatggccgagtgcgccatacattcggcaacgtttaaaccgtgccccagctcaatggtgtaaagcagatcggtattgaacacgctggagttatcagtaatgcgcacgcgcttaaagcgttcctgcagttcagccagcttgtcgatcgttttctgcatcagctccggcgtgcggtagatgccgcagccttcctccatcgacagccccatttcatcgcgaattttcgcccagttttcgttaccttcctggttgacgagatctttcaggcgctgctccacatcggccgcctgcgcatcgagggcggcgccgtttgcctcgcccgcctgagcggcgcgctgcatggcctgctccccggccaggcggccgaagaccaccagctcggccagcgagttggagcccagacggttggcgccatgtaagccaacggacgagcattcgcccacggcaaacagccctttgattcgggtttcgcactgccgatcggtttcaataccgcccatggtgtagtgcgcggtcgggcgcaccgggatcggctctttcaccggatcgacgccgacgtaggctttcgccagttcacagataaacggcagacgctccagcagttttttctcgccgaggtggcggagatcgaggtagaccacgtcgccgcgcggcgtcgggatggtgttccctttccgccactcgtgccagaaggcctgggacactttgtcgcgtgggcccagctccatatatttattcttcggttcgccgagcggagtttccgggcccatgccgtaatcctgcagatagcggtagccgtttttgttgaccagaatcccgccttcgccgcggcagccttcggtcatcaggatcccggagcccggcaggccggtcgggtgatactgaacgaattccatgtcgcgcagcggcacgccatggctcagagccatccccatcccgtcaccggtgacgatgccgccgttggtgttgtagcggtagacgcgcccggcgccgccggtagccagcaccacggcgttagcgcggatctgcaccagggtgccttccatcatattcatcgccaccaggccgcgggcctgcccgtcatcgaccagcaggtcaaggacgaaatgttcgtcaaagcgctgaatttggggaaactgaagggaggtctggaagagggtatgcagcatgtggaagccggttttgtcggcggcaaaccaggtgcgttcgattttcatgccaccgaagcgccggacgttgacgctgccgtcggggcggcggctccatgggcatccccactgctccagctgggtcatttccgtcgggcagtgatgaacaaaatagtcgacgacatcctgctcgcacagccagtcgcctcccgcgacggtgtcgtgaaaatggtactcaaagctatcgtgatcctgggcaacggctgcggatcccccttctgcagcgaccgtatggctgcgcatcggatagactttagaaatcagggcgattttagcgttggggttggcctgagcggcggcgatagcggcacgaaggcctgccccgccggcgccaattacggcgagatcggcttgaaaagtttgcacgacattcctccagttttagtgtatttcgccgccgggctggcgaaaaagtatcactgctcctttataggtacaggagtatagccttagggtcagtatggaaaattgacgtgttcgatttttttatcgatatgtgcggttatttatcagtggtatttatgcgtcagggttaacgatagattaatggcatgtagtctgccggagattgcacaaaatttgtttcactcgccggttgcgagtagacttcgtgcccttaatttgcaatcggagaaagtaccatgagcgagacggcaacctggcagccgagcgcacccattcccaatctgttgaagcgcgcggcggtgatggcggaaatccgccgtttctttaccgatcgcggcgtgctggaggtggagacgccttgcatgagtcaggcgacggtaacggatattcatttgttcccgttcgaaacccgtttcgtcggcccgggccattctcaggggcttaacctgtacctgatgaccagtccggaataccacatgaagcgcctgctggcggcgggttgcggcccggtcttccagctgtgccgcagcttccgtaatgaagagatggggcgtcatcacaatccggaattcaccatgctggagtggtatcgtccatgctatgacatgtatcgcctgatcaatgaggtggacgatctgctgcagcaggtgctggagtgccaaccggcggaaagtctctcctatcagcaggcgtttcagcgccatctggaaattgacccgctctctgccgataaagcacagctgcgtgaagtcgcagcgaagctggatctgagcaatatcgccgatactgaagaagatcgcgataccctgctgcagctgctgttcaccatgggcgtggagccgcacatcggcaaagatcgaccaacgttcatttatcatttcccggcgactcaggcctctttagcgcagatcagcccggaagatcatcgggtcgctgagcgctttgaggtctattacaaaggtattgagctggcgaacggtttccacgagctgaccgacgcccatgaacagcgcctgcggtttgagcaggataaccgcaaacgcgccgcgcgcggccttccgcagcagcccatcgataacaacctgctggcggcgctggaggcgggtttgccggactgctccggcgtggcgctgggcgttgaccgcgtggtaatgctggcgctgggcgctgaaagcatcggcgaagtgatcgcctttacggtagaccgcgcctgatcgctttttcacctccctccgccggcgggtgggggaggtgaaagacgactctgaacctgacaccctcgccccggctttagcccgaatacccacaatttccctccgtgattttgctactatccgcgctctttttatgaggccaggcgtcgctcgtcgggcgatgcccacgtttggatagatttatgcatcaacaactcaagaagatgagcctgatcgggctgattctgatgatcttcacctcggtgtttggctttgccaacagcccatcggcgttttatctgatgggctatagcgcgatgccgttttaccttttttccgccctctttttctttatcccgttcgcgctgatgatggcggagatgggctcagcttatcgtcgcgaagagggcgggatctattcctggatgaaccacagcgtcgggccgcgctttgccttcattggtacctttatgtggtttgcctcgtacgtagtgtggatggtgagtaccgccgctaagatctgggtcccgctctctacttttttgtttggcgcggacaaaacccagacctgggcgctgggtagcctgacgccgacgcagacggtcggtattctggcggcctgctggatggtcgtggtgacctttattgccgtcaaagggatcaataaaatcgctaaaattaccgccgtcggcggtatcgcggtgatggggcttaacctggtgctgctgctggtgagcggggcgatccttctgcttaacggcggtcatttcgcccagccgttaaacttcaccctttcgcctaatcccgggtatcagtcgggcatggcgatgctgtcgtttgtggtatttgccatctttgcctatggcggaattgaggcggttggcggcttagtggataagaccgataagccggaaaagaactttgccaaaggtattatcatcgcggcgatcgttatctcgatcggttactcgctggcgattgtgctgtggggcgtgagcgccaactggcagcaggtgcttggcgcgcgttcgaccaacctcggcaacatcacctatgtgctgatgaccagcctcggggcgacgctgggccaggccctgcacctgacccctgcggcgtcagccctgaccggggtctggttcgcccgtattaccggcctgtcgatgtttctcgcttacaccggcgcgttcttcaccctcagctattctcccctgaaagcgattatccagggcacgccaaaagcgctctggccgtcggtgatgacccgtctcaacgtcaacggaatgcccgccgcggcgatgtggctgcagtgtctgctggtcggggtgtttatcgtactggtatcgttcggtggggatagcgcttccgcgttttataacaagctgacgctgatggccaatgtctctatgaccttgccttatctgttcctgaccatcgccttcccgttcttcaaggcgaaaacccatcttgaccggccgttcgtgatcttcaaaaaccgtccgtcgacgctgctggcgaccggcgtggtgctgctggtggtgaccttcgccaatatcttcaccattatccaacccgtcatcgacagcggggactggaacagcaccctgtggatggtcggtgggccgatcttcttctcactgctggcgctggggatctacgaaagctaccgtcggcgcatggcgtccggcgcgctggtgatggagagttaaagaacctgcccggcggtgcagccgggcaggggatggtttacaggctaccagccgtacggcggctggtttttccggccgaggtcatggttttactgctttgcctgccgtcaatactttccagacgcatctggaacggagggaacggcatatcaatgccatgctcgcggaagcccgccaggatcagctgatgcatctcatggcgcagcggcatgcggtgccccatctccgcggcaaaaatacgtagctcgaaaatctggatcccctgctgcaggtcgacgagaaacgcctccggcgccggggtatcgatgaccagcgagcagcgatgcgccgcggcgatgagaattttcgtcacctcttcggtatcggcgtccacaggcgccggcaccgtcagcaccacgcgggtaaccgagtccgacagcgaccagttgataaactgttcggtaatgaacgccttgttcggcacgataatctcttttcggtcccagtcgctgatggtggtcgcacgggtattaatgcgggtgacgctgcccgtcaggtcgcgaatggtgaccgtatcgccgatgcggatcggcttctcaaacaggataatcaggccggagataaagttggcgaagatctcctgcaggccaaacccgagacccacacccagcgcggcgaccagccactgcagcttcgaccactcaataccgatcatcgagaagcccaccagcccgccgaccagcatcagcagatacttagtgatggtggtgatggcgtagccggtgccgggcgttaaatcgagatgctggaggatcgccagttccagcagcgcgggcaggttgcgtaccagctgagtggtgatgatcagcaccagaatggcaatcaacaccgcgccaagcgtaataggctcaaggctttccaccccttgtaccgtcgaggtcacgtcccacagcgagatattctcaaggaagccaaacgccgagtgaatctccgaccacagcacgatgaccgatagcagcgcgatcagcatcagcagggagcgcacaagccgcagcgactgggtactgatggcatcgaggtcgacctcgctgacctccgtctccaccgacccttccgggctgctgacgtgaacgggctcatcttcgccgcgggcgcgctgagcgagaatttccgcgcgacgatggcgggcccggtcgaaggccagccggcggcgctggatcagcatccagcggcggatgatgtgatagaccaccagcagcaggaaccagatggcgaccgaggtttccagacgcgcaagcagcgcctgggcggtggcgaggtagccgacggcggccgccagcatggccaccagcggggcgccaagcatcaggttccacagcaggcggttcaccatattgtcgccattcccctctttatccagatagagcggaataccggcgtgcttaaggctcagggtgaccaccgccagcgcgccgcagatcagcaggaagcacaggcggcccagcgaagcggagaattcgcggtcgttaagattatcgaacatgatcagcgccataatcagcggcacaatcagcccgatgctcatcaggtagtagcgcatcgccttcgccacgcggctacgcggccagccgaagtgggcgataaacagcccgtttggccgggcgaaggtggcgcagatcatcaccacccacagcaaaggcaccgtcgcggtgactccatcgccaatcgccaccgccagcgggaacggccaggcggactgcagaccatagccgagcgtcatccacagcaccggcagcggcgaggccaccagtatcgaccagaagaccgtgcgcagcgtcagccagaagtgatcctgggtgactttccccacccgggcgctggagcgctcgagaaagcgggtgaaatggcgccgcgagctgatgctaaagccaaccagcagcagggcggcaaacagcggcagcagggtctctttgctggtaagcatcatcgcgctggctttgcccagttcgctgatggtatccagggagatcaggcgccgcagatcctggacgatctccagcggccatgagaagccgatggggctgacgtccgaagtccagaacagatagcggtgggtggcttcgttgatctctttcagcgcgtcttccagctggccgttggcgaccttcagcttggtgagctccagcatcagggtgtcgccgccgcgcagcagcgagttcagcagctcgttctgcgtgcgcagctgcgcctgcaggatcttgttctgctcgctggtcagcggttcgccgtcggcctggcggatctgccgcagctgcggctgcttactcagcaaatcttcaaagcgcagacgctgcacgcgcagctgcgccatttccgtatccagctgctgcgggcgagggcgctccggcagccgcgccacctgggcgcgcagggcttcgcccagcagattggaggagcccagccactgcgactgctcgcgcagagtgtttaacgcctggcgcacctgcagcgtttgattcgtcgcctgccgctgctgggacgccaccagatccatgcgctgcgcctgctggttcagcgcctgggagagctcacggttgaccttaaactgggcggtgatgtccggcggcaggttttcactgttctccgccagcagttcggtactctccagcgccttttccgcctcccgctggcgctggctgttttgcagattgcgcagcgcctgcagataggcatccagctgctcgctctgtttttgcgccagctcggaacgggcgcgcgacagctcctggcggttgttggcggagagctgggcgaggtcgagttcatccaccagcgccttcagacgcgctgattccgcctgcagggcaagattttgcgcctgggcgagagcattgttgccggtttgcgtgccgatgcggcgctcaacctcattgagctgacgacgggcatcggtttgctgctgcggcagctggttcagggagtcggcgatttcacgcgcgcgatcctgctcctgctgcgcctggcggctcgattccagcagttggctgctgacctgcaggatctcctggttcagcgcatcggcggtcaggccggttggcacctggcgcggctcttcgctcagattattgagctgggcacgcaggctttgaaacagtttggggaaattgtcgataacgtcctgatactgacgggcgcgctcgagggatgattttcgctcctcaagcgcgttcagcgcggactgcagaacttcaacggtttcaggctgggcgggctttgccgccttcgcctgttccagttcctgggttatctgtttagcatccggggctgtcgcagcgtacgccccgaaactgaggctcaaggccaacaggaaagtgtatatcaggcgcacggcataacccttttgctgaagaattaaccttggtcttgtttatcgtcaaccagcgggctggcgcggtgttcggcgcggatctcttcttccggtaacggcgcgggttcagcggcggcggtcgcttccactgctgtcgccagcggttggccgatcttggtcacggacaggctttgcagcgtgtcgaccagcttcacctggcccggagcaaacaggttgatcacggtggaacccagtttgaagcggcccatctcctggcctttcagcaaggcgatggagccttcgttgtcgccagcgggccaggtccagcgtttaataatgccttcgcgcggcggggtcacggtgccggaccacacggtctcgatgctgccgacgatagttgcgcccaccagaatttgcgccatcgggccaaactcagtatcaaacaggcagatgacgcgctcgttacgggcgaacaggttcgggacgttctgcgccgtcaagtggttaacagagaacaggtcgccaggaacgtagatcatttcgcgcaggatgccgttgcacggcatgtgtacgcggtgatagtcgcgcggcgacaggtaggtggtggcgaagctgccgttacggaacaggtcggccatctgatagttgccggccagcaaggcttccagactgtagtcatgacctttagcctgcaggattttatcgttctcaatggcgccaagctggctgatcacgccatcggccggcatcaccagcacgtttggatcggtattcagcgggcgaacgtcgtcgcgcagcgggcgcacgaagaaatcgttgaaggtgcgataagccgcggtatccggcttctgcgcctctttcatatcgaccttgtagtatttcacgaacagatcgatgaccagcttcgtcagccaacctgcgcgtttgctcgcaccccagcctgcgaggcgggtgagccacagtttaggcagaatgtattgcagtgaaagtttaagatcgtttaacaaagtagcctccaggccatgatatgtcgttcctgaccccgcctgcgggcggggacctgaaaaaaggggacgattctatacgtaaaactcgccaaatggcatccgcgtaagctgcgtcatcatcgctgcccggcagcgcctgacgtgatgctcagcttaatgatcagtcatcggacgaggaaaagtttttacgcgtttttacctgtacctgcgccatgctttccaggatgcggtggtagttctcaaaacggctttcggcgatcttgccgttctctaccgcttcgcgaagcgcacagccaggatcggtatcgtgtttacagtcgcgatatttgcaacggcctaaataatcatggaattcgacaaagccgttggtgatttgttccgcttccagatgccacaggccgaactcacgtacccccggtgaatcaatcacatcgccgccgtgcgggaagtggtagaggcgtgccgcggtggtggtgtgttgacctaagccggaaacgtccgagacatcattggtgaggatctgatcctcgctcaacccgagcagggcgttcagcaggctcgatttaccgaccccggactgcccggcgaagatactgatgcggtcggtcagggccgcttccagcggcttaaggccgtcctgagtccgactggaaaccagcagcacgcggtaaccgatgttgcggtagatatccatttgctcattgacgaagcgcagaccatcatcatccagcagatcgattttattcagcacaatgagcggctcgatatcctgcgcttcgcaggccaccagatagcgatcgataatattcagcgacagctcaggcaggatcgcggaaaccaccacgatctggtcgatattggcggcgataggcttcacgccgtcgtaaaaatccggacgcgtcaggacggaggcgcgatcgtgcaccgcctcgacgatccctttgacgcttacgccgtcggcggcgtctttacccggccgccagaccacgcggtcgccggtgaccagcgagcggatcgtccggcggatattgcagcgatgcacgctgccgtcagcggattcgacgtcggcatgcataccaaagcgactgatgacaatgccttccgacgtttcgccaaacaggttgtcatcgtagtcggccttctccgcagtggttttcagacggcgctggtggttggctttgacgcggcgctgctggcctttggagagtttatttttactcaatcgaactggctcctggtcgcctgatggggcaaaacctctatgatacacgctattttagatgaatatagtcacgcgagaagggtggaaaatagcatgagtgcaaatgaaaacaacctcatttggatcgatcttgagatgacagggctggatccggagcgcgatcgcattatcgaaatcgccaccctggtgaccgatgccaacctgaacattctggctgagggcccgaccatcgcggtgcatcagtcggacgctcagctggcattaatggacgagtggaatgtgcggacgcataccggcagcggtctggtggatcgcgtaaaggccagcaccgtcagcgagcacgatgccgaactggcgaccattgactttcttaagcagtgggtgccggcgggcaagtcgccgatctgcggcaacagtatcggccaggatcgtcgcttcctgtttaagtacatgccgcaactggaagcctatttccactatcgctatctggacgttagcacgctgaaagagctggcgcgccgctggaagccggaaattctcgacggctttaaaaagcagggcactcatcaggcgatggacgatatccgcgagtcggtcgccgagctggcttactaccgcgaacacttcattaaactgtaaaccgcgaccgggccctgtgcgcggcccggtacacttttctgcgttatttaaaccacttctgctgcatctgctggaagtcaggtgtcgccatgaccgcggccagggcatcgttgatggcgttcagcagctccggatcgtctttgcgcaccgcaatcgcatactgcttaccgtaataagccgggtcggtggcccgttcatccatgatggcgtagtcagggttctcctgctgccaggcgtcgagggtggcgaagtcgcccatgacgccggttatttgcccggctttcagcgcggccagggcgctggcgacatcgtcgtaagggacagcctgtacggctttctgtttatcacgcaggtagcgctgatgcagcgtgcctttcaccacgccgacttttttagccttcagatcggcaaaggtatgggcgacatctttgttgacgatcactaccccggagagcgcctggcgatagggtcggctgaaggcgacctgcttctcacgcatcgggatcacttccatgccggcaatcaccgcgtcaaatttcttaaagcgtaaagccgggatcagggtatcgaaacgctgcgccgtgaactggcactgcgcctgcatctgctggcacagggcgtgcgcgagatcgatatcgaagccaacgggctgatttttgccgttggcggtgacaaacggtggattggccgtggtggtgccaaaatggagcgtctcggctgacgcggttccgatggccagcgtgctcagcagcaggacggtgaggacttttctcatgctaattccctgtttggcgtcggggtggcctcgttatacgtcgcgccaccgctgtatgatgcgagcgattttgcgtcattcagccgggcggaaaaagcgattttgcccgttatgacgcttatttatacaattcagcggcgtagatggcgagaaaatgtccatttaaacaaaaaacgcaaaaaagtgatcgtcagggggttgcaggggcatcgaattctcgtataatgcgcctcccgtaacgacgcagaaatgcaaattacgacgccatcgaaatatggcaaaaaatgcagtaacgcgggaatagctcagttggtagagcacgaccttgccaaggtcggggtcgcgagttcgagtctcgtttcccgctccaaaatttgaaagcaccatcctgatcaaaggatttcatctcgcagatgcggggcgaaagccgaagattaagcgggaatagctcagttggtagagcacgaccttgccaaggtcggggtcgcgagttcgagtctcgtttcccgctccaaaatttgaaagacataccacaccagtcgcagttttcaggttgctagacggtagcttgaatgacgatgattaagcgggaatagctcagttggtagagcacgaccttgccaaggtcggggtcgcgagttcgagtctcgtttcccgctccaaattttcttccatctcttatttatccacagtgcaatccagcgccggggatgattttcgtttggtccgcagaaatactgtgaacagagttatccacaggttgtcgttccgtcactggcggcgcaaatgcttcgctttgtaaatagtatctttgtatgtgattgaaatttaacaaataaatttcatttcaaaatgttaatccgatcacttgaccttggtctgcgccttgaaacgcaatgtgttttagattttattcacagcctgtgaatgaatcaggcgtcgcgcggcaagcctttctctaccactctgaccagacgtaattttttcggcagctgtacttcaacggcgtcggcgttccgctttttcagttgctgggcaatcgcccactcaatgtgttcgtcgagaagcgggtgctcgccccggcggctctccagggcgcgaagatgggcttcatcccagggcgcattgcccaacgcgacggcgatattacgcagccagcgcaggtggccaatgcgacgaatcgccgacccttcggtcaccttcagaaaccacgcttcgctccaggcgaacagctccaccagcggcggggcatgcagcgctttgcgtgggctgaaatcctcttcatcggtgagctgtgagaaacggttccacgggcagatcagctgacaatcatcacaaccgtaaatacggttgccgattagtggacggaactcctcggggattgcaccttccagttcaatggtgagataggagatgcagcgccgggcgtcgacggtatagggctcaacgatggccccggtgggacagatggtcatgcaggcgacgcagcgcccacactcctccgcaaccgggctgtcgaccggcaggggcagatcaatcagcagttcgccgaggaaaaagaacgatccggcgtcgcggcttaagataagtgagtgcttacctgtccagcctaggcccgctttttctgcgattggccgttccaggataggcgcggaatcgacaaaaggtctaaaattgagcgaagcacactgttcctgaatcttctcccccagctttttcaggcgattacgtagcagcttatgataatcacgcccgagggcataacggctgacgtaacccagcgtgggatctttcagggtgcgggcaaaggcggcgttagcgggcagatagttcatccgcacgctgatgacgcgtaacgtaccgggcagcagttcgtgaggacgggcgcgcatcataccgtgacgggccatccattccatttcgccgtggtattgtttatccagccatgcctgcagtttgggttcactggcgctgaggtcggtatcggcgatccccacctgctggaacccaagctctgtgccccattgtttgatttgttgcgctaactgaacgagatcgaggggctgtgacatgatggaccatacaatgacgaaaaaccctgacagtataccatacaacatttggcctgcggaggcgctgcgcctggccgaacgagaggcggcggacagcctggggctgacgctgttcgaactcatgcagcgcgcgggcgaggcggcgttccagctggccagctgtgcttatcctgccagcgcgcactggctgatcctctgcggacatggcaacaacggcggcgacggatatgtcgttgcgcgtctggcacaggccgcggggcggcgggtgacgctgctggcggtggagagtgacagcccgctgccggaagaggcgcaggcggcgcgggaggcgtggcttaacgccggcggcgtgatccatgcggcgaccatcccatggcccgacgatatctcactgattattgatggcctgctcggcaccggtctgcgcagtgcgccgcgcgatcccgttgcggcgctcatccaccaggcgaaccaccacccggcgccggtggtggcgctggatatcccttccggcctgaatgcgcagacgggcgcgacgccaggtgcagtggtacaggccgaccatacgctgacctttatcgccctcaagccggggctgctgaccggcaaggcgcgggatgtcgtcgggcaactccaccatcatgcgctggggctcgaacgctggctcgccggacaaagcactcctctgacgcggttttgcgccgcccacctcgccgactggctgccgccgcggcgggccacctcccataaaggcgatcacggcaagctggtgattgtcggcggcgatcgcggcacggcaggcgctatccgtatgtgcggtgaagcggccctgcgcagcggcgcgggactggtgcgagtacttactcacccggagaacgtggcacccattgtcaccgtgcggccggaattaatggtagatgaactgacgccgcagactctgaaagccgcgctggagtgggctgatgtggtggcgattggccctggcctggggcagcgcgaatggggacgcagcgccctgcggacggtggaaagttttaacaaaccgatggtctgggacgccgacgcgctgaacctgctggcattcaatcccgataaacgtcacaatcgcgtgctaacgccgcaccccggcgaagcggcccgtctgctgaacgtcagcgtggcagaaattgaaagcgatcgcttactttctgcgcagcgtctggtaaaacggtatggcggcgtggttgtgctgaaaggcgcgggcacggtagtggccagtgaaagcggggcgatgggcattatcgatgccggcaatgccgggatggccagcggcgggatgggcgatgtgctcaccggcatcatcgccgcgttgttaggacagcacctgacgccgtatgatgctgcctgtgccgggtgcgtcgctcatggcgatgccgccgaccgactggccgcccgcgagggcacccgcggcatgctggcgaccgatctcttttccacgctcaggcgtgttgttaacccggatgtgattgacgtagaccatgattaaccgagtgattcctttacccgatgagcaggccacgctggcccttggcgaccgcatcgcgcaggcctgtaccggcgccaccgtgatttatctgtatggtgatttaggcgcggggaaaacgaccttcagccgcggctttttgcaggcgctcggtcaccgcggcaatgtcaaaagcccaacttataccctggtggagccctataccctcgagaacctgatggtgtatcacttcgatctctaccgtctggcggatcctgaggaactcgaatttatggggatccgtgattattttgccgacgatgccatctgcctggtggaatggccgcagcaaggcgcaggtgtcctgcctgacccggatgttgaaattcaccttgattaccaggcacaagggcgtgaggcgcgtattaccgcgatctcctcacggggtgaatctttactggcgcgtttagccttttagcctgaaggatgacgggatgaagtatcgcataaccacctggcttgccgctgcgctgatgctgtcgagtcttcacgccactgcggcgagtttatccgatatccaggtctctaacggagaccagcaggcccgtattaccctaagctttgtcggtgagccggagtactcctttaccccacagggtaaacgtctggtggcgctggatatcaagcagaccggcgtattgcagggactaccgctgcagtttagcggcagcaacctggtgaagagtattcgcgccggcacgccgcaggatacgcagacgctgcgtctgctggtggatctgacggaagatggcaaaacccgggcggtgaagcaacagaacggggcgaattacacggtggtctttaccatcaacgccgaagcgcctccgccgcccgtggtggtgaaacgggccgacccgccgccggtgatgccttcccggacgacgacgccagggcgtaacccgttcagctcgtcgggtcatgaacggcagacggtgatgacctcctctcagccggcgatgaccaacaatcagaccgtgactcgcccggcggcccgcacggtgtcggcggatgataaagtcattatcgccattgatgccgggcacggcggccaggatcctggcgcgattggcccgaacggcaccaaagagaagaacgtcactatcgctatcgcgcgcaagctgcgggcgttactgaacgccgatccgcagtttaagccggtgctgacccgcgacggggattactttatttcggtgatgggccgctctgaggtggcgcgtaagcaaaacgccaatttcctcgtctctatccatgctgacgccgcgccaaaccgcgatgccaccggcgcctcggtgtgggtgctctcgaaccgtcgcgccaacagcgaaatggccggttggctcgagcagcatgagaagcagtctgaactgctcggcggtgcgggcgatgtgctggcaaacagccaggccgacccctacctgagccaggcggtgctggatctgcagtttggtcattcccagcgcgtcggctacgatgtggcgaccaacgtgctgagccagctgcagcgtattggcaacctgcacaaacgccgcccggagcatgccagccttggagtgctgcgctcgccggacatcccgtcgatcctcgtggaaacgggctttatcagtaacaacggcgaagagcggctgctgggtagcgatgattaccaggagcagattgcggaggcgatttataacggcttacgcaactactttatgcagcatccgctgcagtcggcgcctcgcggcgaggcggcgcagaccgccagcgccgcggcgccgggcgggatgttgattaactaaggagcaggggatgccgattcaggttctgccgccgcagctcgccaaccagattgccgccggcgaggtggtggagcggcccgcgtcggtggtgaaagagctggttgagaacagtcttgatgcgggtgccacgcggattgacattgatatcgaacgcggcggcgcgaagctcattcgcatccgcgataacggcagcggcatcaaaaaagacgagctggcgctggccctggctcgtcatgcgaccagcaagatcgcctcgcttgacgatctggaggccattattagcctcggctttcgcggcgaagcgctggccagtatcagttcggtggcgcgcttaacgctgacttcgcgcacggcggagcagcaggaagcctggcaggcgtatgctgaaggccgcgatcaggcggtgacggtgaagccggcggcgcacccggtcggtaccactctggaagtcctcgatctgttctataacaccccggcgcggcgcaaatttatgcgcaccgaaaagaccgagttcggccacattgacgaggtggtgcgccgcattgcgctggcgcgtttcgacgtcactatcaacctcagccataacggcaaggtgatgcgccagtatcgggcagtcgctcaggatggccagcgcgagcgccggctggggacaatttgcggcgccgcttttctcgaacatgcgctggcgatcgagtggcagcatggcgatctgaccctgcgcggctgggtcgccgatccgctgcataccaccccggcgctggcggaaattcagtattgctacgttaacgggcggatgatgcgcgatcggctgatcaaccatgctatccgccaggcctgtgaagacaagctaggggccgatcagcaaccggcgtttgtgctgtatctggagatcgatccccatcaggtggatgtaaacgtccacccggccaagcatgaggtgcgtttccatcagtcgcgcctggtgcacgactttatctaccagggcgtactgagcgtactgcagcagcagcttgacgcgccgctggcggaaaaagacgacccgccggcgccgcgcccgatgccggagaaccgcatcgccgcgggcggcaaccagtttgcgcggccagcggaagcgcgggagcctgcgacccgcttcagcatcacgccatcgcgtgagcctgcggcctccagcggcaaaccgggcggcgcgagctggccgcatgcgcagccgggttaccagaagcagcagggagcgctttatcgtcaactgctcgacacgccaacgtcgccaaagccagcgttgcagcctccggcggcggcagagttggccggtcacagtcagagctttggcagagtgttgacgattgttggcggcgactgcgcgctgctggagcgcgagggcggtctggcgctgctgtcgttgaccgttgccgagcgctggctgcgccaggcgcagttgaccccgggagcggaggcggtatgtgctcagccgctgctgatcccgctgcggttaaaagttacggaaggggaaaaacaggcgctggccgccgctcagccggcgctggcgcagctagggatcgatgtgcataccgatgccctgcacgtgacggtgcgcgcggtccctttacccttaagacaacaaaatttacaaatcttgattcctgaactgataggctacctggcgcagcaaaacgcattcgacgtcggcaatatcgcccaatggatggcgcgtaatctgacgagcgaacagacgtcatggaatatggcgcaggcgattgcgctgctggcggacgttgagcgtctttgcccgcagctggtgagaacgccgccgggtggcctgttacaacctgtagatctccattcggcgatgaatgccctgaaagatgaatgatgtaaccgaggcgagcctgcccaaggcaatttttttaatgggcccgacggcctccggcaaaaccgcgctggcgatagccttacgtaaagttttgccagtagagttgattagcgttgattccgccctcatttatcggggaatggatattggcaccgccaaaccggatgctgcggagcttagcgctgcgccgcatcggctgctggatattttggatcctgcggaggcctattccgcggcggattttcgccgcgatgcgctggcggcgatggcggatattgtcgccgccgggcgaattccgctgttagtcggcggaacgatgttgtatttcaaagcgttgctggaaggattgtcgcccttaccgtcggctgacccagaggtcagagcgcggattgagcagcaggccgcagagcaggggtggaatgcgttacatcagcaattacaggagatcgatcccgtggctgctgcgcgtattcatccaaatgatccgcaaaggctttcccgggcactggaagtttttttcatttcgggtaaaactttaacggaactgacgcaaacgtcaggagacgctctgccatatcaggtgcatcagttcgccatcgccccggcgagccgtgaactgctccatcaacgcatagaacagcgttttcatcagatgttagcttcaggttttgaagcagaagtacgggcgctttttgcccgcggagatttgcatacggacatgccttccatccgttgtgtcggataccgccagatgtggtcatatctcaatggcgagatcccgtatgatgagatggtttatcgaggtgtttgcgccacgagacagttagccaaacgtcaggtcacctggctgcgcggttgggaaggtgtgcactggttagacagtgaacaacctgaacaagcgctcaacaaagtattacaggttgttggtgcgagccagaactgaacgtgtacaattaaacggtatcgtgcgtaattttttttgagaatcgtaaggttctgagtacaaaacaagcatacatataaggaaaagagagaatggctaaggggcaatctttacaagatccgttcctgaacgctttgcgtcgggaacgcgttccggtttctatttatttggtgaatggtatcaagctgcaagggcaaattgagtctttcgatcagttcgtgatcctgttgaagaacacggtcagccagatggtctataagcacgcaatttctactgttgtcccgtctcgcccggtgtctcaccacagcaacaatgctggcggcggttccagtaactatcaccacggtggtagcgcgcagggttcttctgcgccgcaacaagacagcgacgacgccgaataaggccagtgctgtttttccacgccggggagccaggttttctgcgttccccgctggtattttataaggggtttacgcttgtttgaccgttatgacgccggtgagcaggcggtactggtacacatctatttttcgcaagacaaagatatggaagatctccaggagtttgaaactctggcctcttccgccggtgtcgaagcaatgcaggtgattaccggtagccgtaaagcaccgcacccgaagtattttgttggtgaaggtaaggcagtcgaaattgcggaagccgttaaagcgaccggcgcttcggtcgtgctcttcgatcatgccctgagtccggcgcaagaacgtaacctggaacgcctgtgcgaatgccgggttatcgatcgcaccggtcttattttagatattttcgcccagcgcgcgcgcacccatgaagggaaattgcaggtcgagctggcgcagctgcgccatatggcgactcgccttgtccgcggttggacccaccttgaaagacagaagggcgggattggtttgcgtggcccgggtgaaacccagctcgaaaccgaccgccgtttattgcgtaaccgtatcatgcagatcctgtcgcggctggaaaaagtcgagaaacagcgcgagcaggggcggcggtcgcgtgcgaaagccgatattcctaccgtgtcgctggtgggctataccaacgccggaaaatcaacgctctttaaccagatcactgccgccgaggtctatgccgcgaaccagctgttcgccaccctggacccgacgctgcgccgcattgacgtccctgacgtcggcgaaacggtgctggccgataccgtcggctttattcgccacctgccgcacgatctggtagccgcgtttaaagcgacgttgcaggagacgcgtcaggcgacgctgctgctgcatgtgattgatgcggcggatgtccgcgtgcaggaaaacattgatgcggtaaatacggttctcgctgaaattgaggccgatgagatcccggcgctgctggtgatgaacaaaatcgacatgcttgacgattttgaaccgcgcatcgatcgcgacgatgaaaataaaccgattcgggtctggctttcagcccagaccggggttggcgtaccactgctttttcaggcattaacggagcgtctttccggtgaagtggcccagcatacgctgcgcttaccgccgaaagaagggcgactgagaagccgtttctatcagcttcaggcgatagaaaaagagtggatggaggatgacggcagcgtgagtctgcaggtgcgcatgccgatcgttgactggcggcgcctctgtaagcaagagccaacgcttgttgactatgtggtttaaccttgcagcttgcctgaagatattgacccctgtggggatatcaaaaacaaatatggagcatatacatggcgtggaatcagcccggtaataacggacaggaccgcgacccgtgggggagcagcaaacctggcggcaactctgagggaaatggcaataaaggcggtcgcgagcaggggccaccggatctggatgatatcttccgcaagttaagtaaaaaacttggcgggctcggcggcggcaagggcggactgggcggcggcaatagcgcgcaggggcctcgcggaccgatgggcgggcgtattgtcggcatcgttgccgcggcggcagtgattatctgggcggccagcggtttctataccattaaagaggccgagcgcggcgtggtcacccgttttggtaagttcagccatctggttgagcctggcctgaactggaaaccgacctttatcgataacgttcaggcggtgaacgtggagtcggtgcgcgaacttgcggcttccggcgtcatgctgacctctgacgaaaacgtggtgcgcgttgagatgaacgtgcagtaccgcgtcaccgatccggagcgctatctgtttagcgtgaccagcgcggacgacagtctgcgtcaggccaccgacagcgcgctgcgcggcgtgatcggcaaatacaccatggatcgcattctgaccgaaggtcgtaccgtgatccgtagcgatacccagcgtgagctggaagagacgattcgcccgtacaacatgggtatcactctgctggacgtcaacttccagacggcgcgtccgccggaagaggtgaaggccgcgtttgacgatgccattgccgcgcgtgagaacgagcagcagtacattcgtgaagcggaagcgtataccaacgaagtccagccgcgggcgaatggtcaggcgcagcgtatcctcgaagaggcacgcgcctataagacccagaccgttctggaagcccagggtgaagtggctcgctttgcgaagatcctgccggaatacaaagccgcgccggaaattacccgcgagcgtctgtatatcgaaaccatggaaaaagtgctgagccacacccgtaaagtgctggtcaatgacagcaaaaacggcaatctgatggttctgccgctggatcagatgctgaaaggcgccgctgcgccggcagcaaagagcgatagtagtgacgccagcgatctgctgcgcctgccgccagcatccagctcaagcagcgccagcacctcatcaacctcgagctcaaccgggggtagcattatggaccaacgccgcgctaacgcgcagcgtaacgactaccagcgtcagggggaataacgatgcgtaaatctgttatcgcgatcattgtcatcgtgctggtagtgctctacatgtctgtctttgtcgtaaaggaaggcgagcgcggtatcacgctgcgtttcggtaaagttctgcgcgacgacgaaaacaagccgctggtgtatgcgccaggcctgcacttcaagatcccgtttatcgaatcggtgaagatgctggatgcgcgtattcagaccatggacaaccaggctgaccgtttcgttactaaagagaagaaagacctgatcgtcgactcctatatcaagtggcgcatcagcgacttcagccgttactacctggcaaccggcggcggcgacgtctcccaggccgaggtactgctgaagcgtaaattctctgaccgtctgcgttctgaaattggtcgtctggatgtgaaagatatcgtcaccgactcccgtggtcgcctgaccctggaagtgcgcgatgcgctgaactcgggttcggccggtacggaagatgaggttagcaccccggcggctgacgacgcgattgctaaagcggcagagcgtgtggaagccgaaaccaacggtaaagtgcaggtgatcaacccgaacagtatggcggcgctgggtatcgaagttgtcgacgtacgtatcaaacagatcaacctgccggcagaagtgtcggaagcgatttataaccgtatgcgcgcggagcgtgaagcggttgctcgtcgccatcgttcacagggtcaggaagaggcggaaaaactgcgcgcgactgcggactatgaagtcaccaagacgctggcggaagccgagcgccagggccgtatcctgcgtggtgaaggtgatgcggaatcagcgaaactgtttgccgacgcgttcagccaggatccaggcttctactcctttatccgtagcctgcgtgcctatgagaagagcttccagagcaatcaggatgtgatggtcctgagtccggacagcgatttcttccgctatatgcgttcaccggattcggcgcgtaaataagccggagaaggtgtaaacctgaagtaataatgcgaaaaggcgcctgaaacaggcgccttttttcatgctgcgagggcgggaattaattgccgagtagcttgttcagcaggccgccgatcaccggcaggcctgccagcgcactttcgatggtgccgccgatagtcgacccaacgctttcgcccagggttttgcccaggtccggcgccaggtcggccagattgagggtgccaagcagtggcaggttaatgctcagggcatcagtgcccatcgtccatgcggctgcgccgaccttgctgcctaaggccgccagaccatcctgtagccagcctgcgccgctcacattttcgatttcaaatgcggttaattctctcatcataatcttcctgattaagtagacgtaccgggttgtagtacgcgatggcatagttacaatttaaaaaatatccagcaatacaattagttgtgaattttgtttcacctttccggttcataatgaagctgaaatacgggacaatgtgaaatgagggaatgaattcaccatgctggccgagacgcccgcgagggcggcaatgatacttttcaattagggttgacgatgaactccaccatttggctggcgctggcgctggttttagtacttgaagggcttggcccgctgctttatccgcgcgcctggcgcaagatggtcgctagcctgagccagctaccggataatttattgcgtcgttttggcggcggacttgtggttgccgggattgtgatctactacatgttgaggaaatcgattggctgatcaaaaagtggtcggatttgccttattttggatgcaaaaagtgctgtaactctgaaaaagcgatggtagaatccatttttaagcaaacggtgattttgaaaaatgggtaacaacgtcgtcgtactgggcacccaatggggtgacgaaggtaaagggaagatcgtcgatctcctgactgaacgggctaaatatgttgtgcgctaccagggtggtcacaacgccggccatactctcgtaatcaacggtgaaaaaaccgttctccatcttattccatcaggcattctgcgtgaaaacgtcaccagcatcatcggtaacggcgtcgtgctgtctccggccgcgctgatgaaagagatgaagggcctggaagaccgtggtatcccggttcgcgagcgtctgctgctctctgaagcctgcccgcttatccttgactatcacgtggcgcttgacgtggcgcgtgaaaaagcgcgtggcgcgaaagcgatcggcactaccggtcgcggcattggcccggcttacgaagataaagtcgctcgtcgcggtctgcgcgttggcgatctgttcgataaagcaaccttcgccgataaactgaaagaagtgatggaatatcacaacttccagttggtgaacttctacaaagcagaagcggttgactaccagaaagtgctggacgatgtgatggcgattgccgacatcctgaccagcatggtggtggacgtatccgacctgctggatcaggcgcgtcagcgcggcgacttcgtgatgttcgaaggcgcgcagggtacgctgctggatatcgaccacggtacctacccgtacgttacgtcctctaacaccaccgcaggtggcgtggcgaccggctccggcctgggcccgcgttatgtggattacgtactgggcatcattaaagcgtactcgactcgcgtcggtgcaggtccgttcccgaccgagctgtttgatgaaactggcgagttcctctgcaagcagggtaacgaatttggcgccaccaccggccgccgtcgtcgtaccggctggctggacgcggtcgcagtccgtcgcgcggtgcagattaactccctgtccggcttctgcctgactaaactggacgtcctcgacggcctgaaagaagtgaaaatctgcgttggctaccgtatgccggatggccgcgaagtgaccaccactccgctggctgccgataactgggaaggtatcgagcctatctacgaaaccatgccgggctggtccgaaaccaccttcggcgtgaaagagcgcagcggcctgccgcaggcagccctgaactacatccagcgtattgaagagctgaccggcgtgccggtggatatcatctctaccggtccagaccgtaccgagactatgattctgcgcgatccgttcgacgcgtaatcactctcaaggggcgccgttcgggcgcccttgtttttgctgttcgcccgccccatttcaaataaattagcggcctgagcgctggctggtttatcatcaataataatgatgtcgctcgacataccctgttttcttttccctgaggtttatgtgcagttaacgagtttcaccgattacggactacgcgcgctgatttatatggcgtcgctgccggaaggacgaatgaccagtatctcggaagtgaccgaggtctatggcgtctcccgtaatcatatggttaaaataatcaatcagttaagtcgcatgggctacgtgactgccgtgcgggggaagaacgggggcattcgcctcggcaaaccagcaggacagatccgcgtcggtgacgtggtgcgtgaccttgaacccttatcgctggtcaactgcagcagcgagttttgccacattacaccagcctgtcgtctgaaacaggcactagctgaagccgcgcagagttttctcaaggaactggataactatacgctggctgatttggttgagaagaatcaaccgctttataaattattgctggtggagtgacgccactctgccggagatgacaacggaggaaccgatatgtcacaagatccattccaggaacgcgaagctgagaagtacgcgaaccctatcccgagccgggaatttatcctcgaacatttaactaaacgggaaaagcctgccagccgcgatgagctggccatcgagttaaatatcgagggcgaagagcaaaccgaagcgctgcgccgccgcctgcgcgcgatggagcgcgacggtcagctggtcttcacccgccgccagtgctatgccctgccggaacgcctcgatctcctcaaaggaaccgttattggccaccgcgatggctatggtttcctgcgcgttgaagggcgcaaagacgatctgtacctgtcgtcagagcagatgaaaacctgtattcacggcgaccaggtgctggctcagccgctgggcgcggaccgtaagggccgccgcgaagcgcgcatcgtccgcgtcctcgtgccgaaaaccagccagatagttggccgttacttcaccgacgctggcgtcggctttgtcgtcccggacgacagccgcctgagcttcgatatcctgatcccgccggaagagataatgggcgcgcggatgggctacgtggtcgtggtcgagctgacccagcgaccaacccgccgcaccaaagcggtgggtaagatcgtcgaagtgctgggcgacaacatgggcaccggcatggccgtcgatatggcgctgcgtacccatgaaattccttatgtctggccgccggcggtggaaaaacaggtttccggtctcaaagaacaggtgccggaagaggcgaaggtcggacgcgtcgatttacgctcgctgccgctggttaccattgacggcgaagatgcccgcgacttcgatgacgcggtgtactgcgagaagaaacgcggcggcggctggcgcctgtgggtcgccattgccgacgtcagctactacgtgcgcccggggacgccgctggatgcggaagcgcgcagtcgtggcacctcggtctacttcccgtcgcaggtagtgccgatgctgccggaagtgctgtctaacggtctatgctcgctgaacccgcaggtcgatcgcctgtgtatggtgtgcgagatgacgatttcgtcaaaaggccgtctgaccggttataaattctatgaagcggtgatgagttcgcatgctcgcctgacctacaccaaagtgtggcatatgctgcagggtgaccaggaactgcgcgaacactacgcgccgctggtgaagcacattgaagagctgcataacctctacaaagtgctggagagcgcccgcgaagagcgcggtggtatctcatttgaaagtgaagaagctaaattcatcttcaatgccgaacgccgtattgagcgtatcgaacagactcagcgtaacgatgcgcataagctgattgaagagtgcatgatcctggcgaatatctccgccgcgcgcttcgttgagaaggcgcaggagccggcgctgttccgtatccatgataagccaaccaccgaagcgattacctccttccgtaccgtgctggctgagctgggactggagctgcctggcggcaacaagccggagccgcgtgattacgccgaactgctaacctccatcgccgatcgcccggatgcggaaatgctgcagacgatgctcctgcgctccatgaagcaggcggtctacgatccggaaaaccgcggtcactttggcctggcgctgcagtcatatgcccacttcacctcgccgattcgtcgttacccggacctgtcgctgcaccgcgctatcaagtatctgctggccaaagagcagggacataaaggcaacagcaccgagaccggcggctggcactacagtatggaagagatgctccagctgggtcagcactgttcgatgaccgagcgccgcgccgacgaagcgacgcgcgaagtgtctgactggctgaagtgcgacttcatgcaggatcaggtgggcaacatcttctccggcgtgatcgccagcgtgaccggctttggcttcttcgtccgcctgaacgatctgtttatcgacggtctggtgcatgtttccagcctggataacgactattatcgtttcgaccaggtggggcagcgtctcattggtgagtccggcggccagacctatcgcctgggcgaccgcgtggaagtccgtgtggaagcggtcaacatggacgagcggaaaatcgactttaccctgatctccagcgagcgtgcgccgcgtaatgtcggcaagaccgcccgtgagaaagcgaaaaagagtacctctggcaagccgggcggccgtcgccgccaggtgggtaagcaggtaaacttcgagccggacagcgctttccgtaaagagaaagagaccgcccgaccgaagaaagagaaaaaagcgaaaaaaccgtcggcgaaaacacagaaaatcgccgccgcgacgaaagccaagcgcgcggcaaagaagaagatcgccgagtgattgacctcccttcaccctgaagtctgctgacgcaggatggggtgaagggggcagataacagaacctaaaacgagtacatcaatgagtgaaatgatttacggcatccatgcggtgcaggcactgctggagcgcgcacctgagcgttttcaggaagtttatattctgaaaggccgtgaggataagcgcttgctgccgctgatccatgccctggaagcgcagggcgtggtgattcagctggccaaccgtcagtttcttgatgagaagagcgaaggcgctgtgcaccaggggatcattgcccgcgtgaagccggggcgtcagtatcaggagaacgatctgccggatctgctggcgcagctcgatcaaccgttcctgctgatcctcgacggcgtaaccgatccgcacaacctcggcgcctgcctgcgtagcgctgacgccgccggcgtgcatgcggtgatcgtgccaaaagatcgttccgctcagttgaatgcgacggcgaagaaagtggcctgcggcgcggcggagaacgtcccgctgatccgcgtcaccaacctggcgcgcaccatgcgtctgctgcaggaagagaacgtctggatcgtcggaaccgcaggggaagccgaccatacgctgttccagagcaaaatgaccggcccgatggcgctggtgatgggcgcggaaggcgaaggcatgcgtcgtctgacccgcgaacactgcgatgagctgatcagcatcccgatggcgggcagcgtctcctcgctgaacgtctcggtggctaccggcatctgtctgtttgaagcagtacgtcagcgcagctaagctgaaccatcgacgaatcaaaaaaagccatcctccaggatggcttttttgtgaccgctctcgcgggcgagtatccctccggataaccatacttatggctatcgccattgatggagggagacacgatgcactggcaaacgcacaccgtttttaatcaacccaccccgctgaataacagcaatctgtttctgtccgataccgctctgcgtgaagcagtggtccgcgaaggcgccggctgggatggcgatctgctcgccagcattggccagcagctggggacagccgaatcgctggagctgggacgcctggccaacagcaatccgccggagctgctgcgctatgacgccaccggcgcccggctggacgacgtgcgcttccatcccgcctggcacctgctgatgcaggggctgtgcgcgaatcgggtacataacctcgcctggcaggaggatgcccgcgaaggcgcgtttgtcgcccgcgccgcccgctttctgctccatgcccaggtggaggccgggacgttgtgcccgattaccatgaccttcgccgcgacgcccctgctgcagcacgccctgcccgcgccctttcgcgactggctgtcgccgctgctgagcgaccgttacgatccgcaccttgcgcctggcggccagaagcgcggcctgctgatcggcatggggatgaccgagaagcaaggggggtctgatgtgctgagcaataccactcgcgcggagaaaacggcggaagggttttaccgactggtgggacacaagtggttcttctcggtgccgcagagcgatgctcacctggtgctggctcaggctccggcggggctctcatgcttctttgtgccgcgtctgctgcccgacgggcagcgtaacggcgtgcgtcttgaacgcttaaaagagaagctcggcaaccgctccaacgccagtagcgaagtggagttttatgaggcctgcggctggctggtgggcgacgaaggcgacggcgtgcggcagatcctcaggatgggcggcctgacccgctttgactgcgcgctgggcagccatgccctgatgcgtcgcgccttctcggtggtgctgtatcacgcgctacagcgtcaggcgtttggcaaaaacctggtcgaacagccgatgatgcgccagctgctggggcaaatggcgctccgtctggaggggcagaccgcgtttctgtttcgcctggcgcgggcctgggaccatcgggatgatgcccgggaaagcgcctgggcgcgcctgtttacgcctgcggccaagtttgccatctgtaaggccggtatcccgtttgtcgccgaggcgatggaagtgctgggcggcatcggctattgcgaggagagcgaactaccgcggttgtatcgcgagatgccggtcaacagcatctgggaaggctccggcaatattatgtgcctcgatgtgatgcgggtgctcagcaagcagccggcggcgatggagctgctggccgcggagtgtgcggaggtgaaaggacagaaccgccatctcgaccgcgcatggcgtcagctgcagcaactgctgaaacgacccgccgaagagcaggggagagagattgcccggctggtctatcgtcttggcgcgggggcgcagatgctgcgccatgcttcgccgccgctggccgaagcctggtgcaggatgatgctcgacacccgcggcggcatacgtcttgacgcgccgaccctcgacgacctgctgctgcgggctatggggcgcgggcgccaggcgcctcaggcgtagagaatggcctgcacgcgccagctgtccggctgttgttcctcgtacatctgaataatgcgataccaggaggcgccttgctcgtctgctttgcgggcaatggcgtgctctacatcctgttggctaccggaaagattagtgacggagatcagaccgatttcattcaggccagtgacgcaatccgcgctggcgaattcggctgactgcgcggacgtattggccgtcgcagcggttaacagcaggctggatagggtaaaagatcgtttcatcgtcagctccatttcacgtagtcccaagggcagtccgttgctaacgtcctgccaggtggctggccgaacgttattatgcacaggagaacgtgaatggacgcaaagctgtgtaaagcagatttaaagacgccgcctcgttatcgacgatagaggatcgcctgcgaataccactggccgggtaccatggtgtcatcgatcatgatgatgacgtagtaatcggctttggccgcttctgctttggccttcagcgccgcttcgacatccatcggcgaaccgtacatcagtacgctcaccgtggccattttatgcaggccagccgtctggtagcgctggatctcctgcggatggtcggtggcgggcggcggggcttccggcgttccctgcagggcgctacacccgctgaggacgatagccagtaaccacggtgaaaacctgcgcataaccatatctcgtttcctgatagtgatagtgtagtggtagccttaacaggattgccggggaatgttcccgaactgttatctctgacgcgattttcgaatgaaaatgttgtgaaagcgtaaccgggttctcaacattatgaatcgtagcaaactgggttgcctggtgaatgaattttcccatgacgcctaaccacgatagagaaggaagacgataaatgattgcactagaaatgcgcaacctcggcggtggtgaaattttacatgcctgtccgcaggagagtctggataagcccttgccctgtatcgtcttttatcatggctttacctcgtcgaagctggtctacagctactttgcggtggcgctggccgaggccggattccgggtgatcatgccggacgcgccggagcatggggcgcgctatcagggcgatgaggccgggcggatgcagcgcttctggccgattctgcagcagaatttcagggagtttcctgcgctgcgcgaggcgataatcgctgaaggatggctggaaggggagcggctggcggtggcgggcgcttcgatggggggaatgacggcgttgggcatcatgacgcatcaccccgagctgaacagcgtcgcctgtctgatggggtcgggctattttcgttccctgtcgcaaaccctgttcccctcgcctgattttgatgtcgatagcctcaacgaatgggatgtcagccatcagctggcgtcccttgcccggcgaccgctgctgctctggcatggcgatgccgatgacgtggtgccgccggaagagaccttccgtcttgagcaggcgctgcggcaaggcgatcttgccgccaggctgacctgtgtctggcagaaaggcgtccgccatcgcattacgccagaggcgctggctaccacggtcgccttttttcagcagcacctttaaacgcggattacgctgacgccctgatcctcaagctgtttgaggatcgcggcatcggcctgtttgccggtgatcaccacgtctatttgtccggcctggctgaatagcatcccggcgcgctcgccgatcttgctgctgtcgaccagcaccgccagtttgccgaccacgttaagcattttttgctcggccatggcggtcaacatatccgttttgtagaggccttcggcggtgagccctttgccgctggtaaacatccagtgtccggcatagaggctgttctcgctaccgtgggggctgagggtgatggcgtggctgcggttgtactggccgcccatgataatcacgctgtcatgctcctggtcgatcaggtagttagccagcggcagatagttggtgatgatctgcaccggtttgccgcacagttcccgacccaacagaaaggcggtggagccgcagttaatgacgatgctctcacccggcgcgatcagttgcgaagcggcgcgtgcaatacgcactttttcatccagattttgcgcctggtggatgttcatcggcgtccagcgggggcgctgttcgctaatggcttccgcgccattacgaacctttttcagtttgccgctttcatccagcttgttgatatcacgtcgggcggtagcgggtgagatcccgagccgcgacatcacctgctccacggtaacaaaccccgtttgggcgagcagatccagcagaatttggtgcctttgcgcttccgtcatgagcgaatccgattaaaagtgaacggcaaagatgatatttgaaatcatgtgaaaatactaaccctgcggcggggtatttccggcaggcagggcctgccggcggcgacttacaggaaggatttgaaaggcagatccggctcaatggtaaagcagtcgtcgaaaccgcgcgggtagtgatattcgaaattgtctttatccagcggccaggtaaatttgccgccgacctgccagataaacggcttgaagccgtacttcagacgatcctttttcatctcccacagaacgcggatctcctgcggatcggcctgaaagtttgaccagatatcatggtggaacgggatcacaactttggcgttgagcgactctgccatgcgcaggatatcggcgctggtcattttgtcggtgatcccgcgcgggttctcgccatacgagccgagggcgacgtcaatccgatgctcgttgccatgcttcgcgtagtagttggagtagtgggaatcgccgctgtggtacaggttgccgcccggtgttttaaacaggtagttgaccgcgcgctggtccatgccgtccggcagtacgccagcggctttttggtccgccgggagggtgatcagcgcggtgcgatcgaacgcatcgagcgcatggatctcaatgtctttgatcttcacgacatcgccaggtttcatgacgatacagcgcgctttcggcacgccccaaccgatccacaggtcgacgcaggttttcgggccgataaacggcacatcggccgggcagttctgcatgacggcggcggcgacgttgacgtcaatatgatcgttgtgatcgtgggtcgcgaggaccgcgtcaatctggcgaatggcgaacggatccagcacgaacggcgtggtgcgcaggttcggctgtaattttttcacacctgccatccgctgcatctggtggccggttttcatcagcggattgccgtggctctgtttgccagtgccgcaccagaaatcgacgcagacgttagccccgccttcggattttaaccagataccggtacagccgagccaccacatggcgaaggtgccgggcgcaacctgctcctgctcaatctcttcattcagccagctgccccattccggaaaggtgttcaggatccatgattcacgggtgatggtctgtactttactcatcgtgctcttcctcgtattttcaatagtaatcaaattttgattggttttgatttatgttgtcactggattttcaagattgcaatcttgttttccatcaattttacgaagagatgcgcatcatctctcagggggtccagcatccataaaggttgtgctttgttttatctatatgatttgaaaatgtttaattatgtttcggcgctactgatcggcaatagtcacaatgaaatagaggattattgcggcgcgcgtcacatttaatcaaattcaatcttgttgtgattatttttgattattagagtgggcagcgagaaatgctgagcgtaaggcgcgttcagcgccttcaccatcgggagtgtgttatggcaatcctctacaacatctttaccgttttctttaatcaggtgatgaccaatgccccgctgctgctgggtatcgtcacctgtctgggctatatcctgctgcgcaaaagcgtcagcgtgattattaaaggcacgatcaaaaccattatcggcttcatgctgttacaggccggctccggcatcctcaccagcacttttaaaccggtggtggcgaaaatgtcagaggtgtacggcatcaacggcgcgatctctgacacctatgcctcgatgatggcgaccatcgaccggatgggcgaggcctatagctgggtgggctatgcggtgctgctggcgctggcgctcaacatctgttacgtcctgctgcgccggataaccggcatccgcaccatcatgctgactggccatatcatgtttcagcaggcggggctgatcgccgtctcgttctttatctttggttacggaatgtggacgaccatcatctgtaccgccgtgctggtctccctgtactggggtatcacctccaacatgatgttcaagccgactcagctggtcaccgacggctgcggcttctccatcggtcaccagcagcagtttgcctcgtggattgcctacaaagtggcgccgtatctggggaaaaaagaggagagtgtggaagacctcaagctgccaggctggctcaatatcttccacgacaacatcgtttccaccgcgattgtcatgaccattttctttggcgcgatcctgctttcctttggtattgacgtcgtgcaggcgatggcggggaaaacccactggacggtctatatcctgcagaccggtttctccttcgcggtggccattttcatcattacccagggcgtgcggatgttcgtcgccgaactgtccgaagccttcaacggtatctcgcaacgcctgatccccggcgcggtgctggcgattgactgcgccgcgatctatagctttgcgccgaatgcggtggtgtggggctttatgtggggcaccatcggccagctgattgccgtcggcattctggttggcattggctcttcaattctgattattccgggctttatcccgatgttcttctccaacgcgacgattggcgtctttgccaaccacttcggcggctggcgcgcggcgctcaagatctgcctggtgatgggcatggttgaaattttcggttgcgtgtgggcggtgaagctcaccggtatgagcgcctggatgggaatggcggactggtcgattctggcgccgccgatgatgcagggcttcgcctccatcgggctggcgtttatggccgtcatcatcctgattgctctcgcttatatgttcttcgctggccgcgcgctgcgcgccgaagaagacgcggaaaaacaactggcagaggcctctgcccaataaggagttctgattatgaccgtacgtattctggctgtgtgtggtaacgggcaaggcagttccatgatcatgaaaatgaaagtggatcagttcctgacgcaatccaatatcgaccacacggtgaacagctgcgcggtgggtgaatacaaaagcgaactaaacggcgcggatatcatcatcgcttcaacccatatcgcgggggagattaccgtctccggcaataaacacgtggtgggggtgcgtaatatgctttcccccgcggatttcgggccaaagctgctggaggtgattaaagctcatttcccgcaggacgtgaaataaggagcggctatgaaactccatgaatcactggcgcagaatcactccattcgcctgcaggcggaagcggaaacctggcaggaggcggtgaaaatcggcgtcgatctgctggtggccgccgacgtggtggaaccgcgctactaccaggcaatcctcgacggcgtcgcgcagcacggcccctattttgtgatcgctccgggattagccatgccgcacgggcggccggaagagggcgtcaaaaaaaccggctttgcgctggtcacgctaaagaaaccgctgattttcaaccacgaagataacgacccggtcgacatcctgatcaccatggcggcggttgacgccaccacccaccaggaagtgggcatcatgcagatcgttaacctgtttgatgacgaagccaatttcgaccgtttacgcgcctgccgcagcgagcaggaagtgctggatttaatcaaaaacgccaccgcggcggctgtttaaaaggaacactatcatgtcattacctatgttacaggtcgccctggacaaccaaacgctggccagcgcttatgaaacaacccgtctgatcgccgaagaggtagatatcattgaagtcggcactatcctctgcgttggtgaaggtgtacgcgcggtgcgcgatctgaaagcgctgtatccgcataaaatcgtgctggcggacgccaaaattgccgatgccggcaagatcctgtcgcggatgtgcttcgaagccaacgccgactgggtcacggtgatctgctgcgccgatatcaacaccgccaaaggggcgctggatgtcgccaaagagttcaacggcgatgtgcaaatagagctgaccggcttctggacctgggagcaggcgcaggcgtggcgcgaggcgggtattcagcaggtggtctatcaccgcagccgcgacgcgcaggcggcaggcgtggcgtggagtgaggcggatatcagcgcgattaagcgtctgtctgatatgggcttcaaagtgaccgtcaccggcgggctggcgctggaagacctgccgctgtttgccgggatccctgttcacgtctttattgccggacgcagcatccgcgatgctgcctcgccggtggaagcggcgcgccagtttaaacgctctatcgcccagctgtggggttaaggagcgactatgttggcgaaatccattccgctcggcatctatgaaaaagcgctccccgccggggagtgctggctggagcggctaaagcttgcaaaagcgctgggctttgatttcgttgagatgtctctcgatgaaacggacgcccgccttgcgcggctggactggagcccggagcagcgtctggcgctggtcaaggcggtggctgaaaccggcgtccgggtgccgtcgatgtgccttagcgcccatcgccgttttccgctgggtagtgaagacgacgcggtgcggcatcaggggctggaaattatgcgtaaagctattcagctggcgcaggatgtggggattcgggtgatccagctggcaggctacgacgtctattaccagcaggcgaacgatgagacgcgccgccgctttcgcgacggcctgaaacagagcgtcgagatggccagccgagcccaggtaaccctggcgatggagatcatggactacccgctgatgaactcgatcagtaaagcgctgggctatgcccattacctgaataatccgtggttccagctttacccggatatcggcaatctgtcggcgtgggataacgacgtccagatggagctgaaggcggggagcgggcatatcgtggcggtacacgtcaaagacacgaagcccggcgtctttaaaaacgtgccgttcggcgaaggggtggtcgattttgaacgctgcttcgaaacgctcaagcagaccggctactgcggaccgtacctgattgagatgtggagcgaaaccagcgctgacccgctggcggaggtggcgaaggcgcgtgactgggtgaaggcgcggatggcccgcgcgggcctgatggaggcggcataatgcaacagctgaaacagcaggtgttcgaggccaatatggatctgccgcgctacggcctggtgacctttacctggggtaacgttagcgccattgatcggcagcgtgggctggtggtgattaagcccagcggcatcgcctacgagtcaatgaccgtcgatgacatgtcggtggttgatctgcaggggcacgtggtggaagggcgctggcgtccctcctctgataccgccacccatctggcgctctatcgccgttatcccgaccttggtggggtggtgcatacccattcgacgcacgccaccgcctgggcgcaggcggggctggcgatcccggcgctcggcaccacccatgcggactacttcttcggcgatattccctgcacccgggcgcttagcgcacaggaggtggacgaggcctacgagctgaacaccgggcaggtgattatcgaagcgctgggtgaggccaatccgctgcatacgccggggatcgtcgtctatcagcacgggccatttgcctggggcaaagacgcccacgaggcggtacacaacgcggtggtgatggaagaggtggcgcgcatggcgtggattgcccgcggcattaatccgcagttgcagcccatcgatagctggctgatgaataagcattttcagcgtaagcatgggccaaacgcctactatgggcaaaagtagatagcgcgctccggggctttcacccctcacggtgaagcaactggtctggccccggggccgtttttaatcctgacgataggccgacggcatcacgcgcatgccgatgagcgtgaccacgcaaattatcgccccggcgtaaaacgtcgaggcggcgccgaaggtttcccacagtacccccgcgccggtgctggccagcagcagagccaggccactcatcagattaaacataccgaacgccgtgccgcgtagctccggtggcgccgtatgggcgaccatcgccgccagcaggccctgggtcattcccatatgaatcccccacagcgcgacgccgatcagcagcgtgctccagtggccgctgagcgccagcacgatatcggcgaggatcagcaccagcagcccccactgcagcagtttgctgtggctcatgctgtctgagagtttaccgaacgggtaagccgtgaggctgtagaccaggttcatcgccaccatcaccagcgggatggtatagagcgggatctccatctgctgggcgcgcagcaccagaaaggcttcgctgaagcgggcgagggtgaaaatgctgccgatcgcgaccacccaccagtaggcggcggagagctttttcaggttttcgcgcttcagcggattgctgcgtttgtgcgcgatggcggattttggctcctgtaggccgaatccgagcaggagaatggagagcacggcgggaatgaccgccacccagaaaatagcgtgaaaatcgttggcccagataaacatcagcagcaccgccagcagcgggccgagaaaggcgccgacggtatccagcgcctggcgtagtccgtaggcggcgccgcggatctccggcggggtgacgtcggcgaccagcgcatcgcgcggcgcgccgcgaatacctttgcctacgcggtcaatcatgcgggcgctaaacaccaccccggcggtaggggcgatggcaaacagcggcttactgagcgcgcccaggccgtagcccagcagcgccagtcctttacgcttgccgacatagtcgctgatcgcgccggagaagaccttcaggatcagggcggtggcttccgccagtccctcgataagaccgataattatcacgctggcgccgagggtagtggccataaacagcggtaagaggctgtggatcatctcggaggagacatccatcagcaggctgacgccgccgagtacccaaacgcctttggggatacggcctaaggtggcgaaacgcggaaccatcaatcactcctgattatcaaatggcgagtggctgattaaatcaggttgcgatgacgctggtaagtcggtttgtaaaataattctcaattgcgtttgggcgcagacctcgcttcgcccctcgcgaggagaggcgaagaatcgggcaggcgttagcggtatatcaccgcgctggcgcgaagcgggccgttggtttctggttcgtgcatcaggataggctgaaagtatttcgccccctgcgcatcgctcatctggctaagggcctgttcggcctcgtgctcagtggccatattgtgattgatatagataacgccgaggctctgcacgtcgtccatgttgcgggcctgacgttcggtgatttggatagctgccagcgcgttggcgctgaagaaaagcgcagccatcatggcgatgattttcagtttcatatactacgctcctgactgacagtcctgacgctgactcggggctctcctgtgatcgttgggctttgatagaagtgtaatcgctgcgcgttcatcgcatggcgaccttttctgatgcagttgttcaaaaaaatgccgcttcctttattggttaattttaaatcacccacttagcccagcttggcgcttagtgcgaattatttgtgcaaatgcgcttgtgttcctgaggggccgccattagaatgacgcgtcaatttttcagccgccctttaacacgttccttgcctccatgggccgcggctgacccagacaggaggctgaataatccgtaaggagcaattcgatgcgtcattacgaaatcgtttttatggtccatcctgaccagagcgaacaggttccgggcatgatcgaacgttacactggtgcaattactgcagcagcaggtacgatccaccgtctggaagactggggccgccgtcagctggcttatccgatcaacaaactgcacaaagctcactacgttctgatgaacgttgaagcgccgcaggaagcgatcgatgagctggaaactaacttccgcttcaacgacgccgttatccgcagcatggtaatgcgtactaagcacgctgttaccgaagcatctccgatggttaaagcgaaagacgagcgccgtgagcgtcgcgaagatttcgccaacgaaaccgcagatgattctgaagctggggattctgaagagtaatcctgatgaccaaccgtctggagctgtccggcattatttgcaggactccacttcgtaaggtcagcccgtcaggaattcctcactgccagttcgtgcttgagcatcgttcagtgcaggaggaagccggttttcaccggcaggcatggtgtcagatgcccgttattattagcggtcatgagaaccaggccattactcacagtataacggtcggtagcgcagtaaccgttcgagggttcatctcttgccataaggcaaagaacggcttgagcaaaatggttctgcatgccgagcagattgaattgatagattctggagactagccatatggcacgttatttccgtcgtcgcaagttctgccgtttcaccgcggaaggcgttcaagagatcgactataaagatatcgctacgctgaaaaactacatcaccgaaagcggtaagattgtcccgagccgtatcaccggtacccgtgcaaaataccagcgtcagctggctcgcgctatcaaacgcgctcgctacctgtccctgctgccgtacactgatcgtcatcagtaatcggtcacggtccattaatacgactttgagaggataaggtaatgcaagttattctgcttgataaagtagcaaacctgggtagcctgggtgatcaggttaacgttaaagcgggctatgctcgtaacttcctggtcccgcagggtaaagctgttcctgctaccaagaaaaacgttgaattcttcgaagcacgtcgtgctgaactggaagccaaactggctgacgttctggcagcagctgaagctcgtgctgagcagatcaacgccctggaatccgtaaccatcgcgtctaaagctggcgacgaaggtaaactgttcggttccatcggtactcgcgacatcgctgacgctgttactgcagcaggcgttaaagttgctaagagcgaagttcgcctgccgaacggcgttctgcgtaacgttggcgagcacgaagtgaacttccaggttcacagcgaagtattcgctaaagttatcatcaacgtggttgctgagtaatcggcctctgacgttctggtaacaacaaaccgccggccttgtgccggcgttttgctttttagcgcctttcattttgcggcggcgtaacgcttgctgtcgtcttctctgctatcgcgcacgcacaaagctgccgttcgactggcgggtaaacagcacctgctggccgttgccggtatcgatagtgagcccggtgaccacgccgttggcgttctgccgaatctgcaccgtctgtccgctctgcaaagtacttagcggcttgccagcgccttcaacctgcgccatggcgtagacgtcagtggccggcagcccatgatcgcggaacagctgcgccagggttttgcctgactcgatgcgataggtccgccattgctgctcaatacccggcgcggactgctgtgatgaggattgataaggctgggtggcggcgggctgctgcgtctgcgcttgatccggctgctcatcctgaatcggctccgggcgaccggcgccatctgatcggcgtcgctcacggtaggcgtattagtgatcggcggcagcggaacggcctgattgccgccagcttgcggctgggactgcgactgtagattcaggttcgcttcacggctggtcgacgccgggctttggctatcatcggagggaagcagaataccaataataaccaacaggaagccagcgataattccccggcggtgcatcggaggcagcgggtccaggaggcgaaaatgatccggggcgtgccagattttcgccagggtagatgtcagttcaaagcgcccgggcatggctttcctcctgctccgcatatttatatcctgctcatgagtatagatggctaacgtcctgatgaccggaacaaagtgaagttaacctgctgccgcctattgtttctttttcgctgagatttgtcatcatccgccgacaaagttttacccatttcgctatggctgttatgctttcgcacgcttttatcttgatgtttatcacccaaaaaggaacaacgatggcaaccccaacttttgacactatcgaagcgcaggcaagttacggtatcggcttgcaggttggacaacagctgagcgaatccggcctgcaggggctgctgccggaagcgctggtggcgggtatcgccgatgcgctggaaggtaaccagccgcaggtgccggtggaagccgttcaccgcgcgctgcgtgaaatccacgagcgtgctgacgctgtgcgtcgcgagcgttttcaggccatggccgctgacggccaaaaataccttgatgaaaaccgcgagaaagaaggtgtgaacagcaccgagtctggtctgcagttccgcgtactgacccagggcgaaggcccgatcccggcgcgtactgaccgcgttcgcgtgcactacactggcaaactgatcgacggcaccgtcttcgacagctccgtcgctcgcggtgaaccggctgaattcccggtgaccggcgtgatcggcggctggattgaagcgctgactctgatgccggtaggttccaaatgggaactgacgatcccgcacaacctcgcctacggtgagcgcggcgctggcgcatcgattcctccgttcagcaccctgatcttcgaagttgaactgctggacattatctaaacagcagcggcttcctcttccccgcggcaggggaagccataaaaatagcgtaaaatccttaagttaaaaattaattggaattatgttttgcattcatcacgtatgggtgtatttttgtgagctatttcgcgttagatgagtgatataacactcactttaaacataaaattaacattatatctaaatcatagtattcatccctccgattcttacctaatatcgactagcccttgctggggttaatgacagacgacgggccatcagagcctgaacaacacagacaggtacaacaggaagaaatcacatggtagatcaggttaaagtcgctgctgtcgagcaggagccgactgaacaatcgctacggcgaaatctcacaaaccgacatattcagctgatcgcgattggcggagcgatcggcaccgggttatttatgggttctggcaaaaccatcagccttgccggaccatccattatctttgtttatatgattatcggttttatgctgtttttcgtgatgcgtgccatgggcgaattactgctgtcgaacctcgaatataaatcctttagcgacttcgcggccgatctgctggggccgtgggcgggctactttaccggctggacctactggttctgctgggtagtgaccgggatggcggacgttgtcgccatcaccgcctacgcgcagttctggtttcccggactctccgactgggtcgcctcgctggcggtgatcctgctgctgctgggcctgaacctggccaccgtcaagatgtttggcgaaatggagttctggttcgcgatgatcaaaattgtcgccatcgtggcgctgatcgtggtcggcctggtaatggtggtgatgcatttcaaatcgccgaccggggtcgaagcctctttcgcccacctgtggaatgacggcggctggttcccgaaagggctgagcggcttcttcgccggcttccagattgcggtgtttgccttcgtggggattgagctggtgggtaccaccgccgccgaaaccaaagacccggaaaagtccctgccgcgagcgattaactccatcccgctgcgtatcattatgttctacgtcttcgcgctgattgtgattatgtcggtgacgccgtggagctccgtggtgccgagcaagagcccgttcgttgagctgttcgtgctggttggtctgccggcggcggcgagcctgatcaacttcgtggtgctgacctccgcggcctcctcggccaacagcggcgtgttctctaccagccgtatgctgttcggtctggcgcaggatggtcaggcgccgaagatgttcgccaagctgtcgaagcgtgcggtgccggcgaagggcttaaccttctcctgcatgtgtctgctgggcggggtggtgatgctgatggtcaacccgagcgtgattgccgccttcaccatgatcaccacggtgtcggcgatcctgtttatgttcgtctggaccatcatcctttgctcttacctggcgtatcgcaaaaaccgccctcagctgcatgagaagtcaagctataagatgccgctgggtaaagtcatgtgctgggtgtgcatggccttcttcgtctttgtgctggtgctgttgaccctggaagacgatacccgtgaagcgctgatggtcaccccgctgtggtttgtgctgctgggcgcgggctggctgtttgccggcaaaaaacggctggcgaaataaacgaaaattttaacgttgcttgcaacggcccgtcataaaaaaggccacccggagtggccaaataagacggacaatgtcgagggcgcccgcgggcgcctttttctttactttccgccgagggcgcgcgggaacagcacattattttccaggctgatgtgttccatcagatcgtcgatcatctcgttgataccgttatacatcgccttccaggtggtacaggcttccggcggcggcgtcacgttgtgggtgatgtgcttaatgacttccagcagttcacccgcttcatcatgctcgctttccatcacgctgatcggccccccggcctgggcgcccattccctgtttgatcatcgggaacaggatctgttcctctttcatcatgtggctggaaagctcctgatgcagcatggtcaggtacttagtcagtcctttcggtacgttcggtttatcggcatggacgcgttcaaccttggtggcctgcaggatcagctccggcagctgttcacggtgccggtcgtgatagcgaacgatgatatggtcgataatctccgcgaggggcgccgcgcgccagtcgcgggagagaggctgttcggccagtttcgccagctcggcttcaatcaccgcgacatccagcgctttgcgcgacgcggcgcgcgccagggtctgtttgccgccgcagcagtaatccatatcgtattgacggaacagggcggaggcgcgcgggatggtcagcgccagctcgcctaaaggttggtcacggaaagccatagcagttacctcgtcatcaggaatataagatgtattttaaatgcatctttttggcgagggaataccccttaaggaggcgaggctactttttttcgtccgccagcggctgcagcatcggtttttccggtctggcgcgtacggcggagaccacgccgagcaccagcagcaggatgccgctcagggtcagcagcggcggtaagctttgccgcagcaggaaggtatacagcagtccggccagggtttcgaagacgataagcgggccgaggatcaccgtcggcagccgctggctggcaatattccagcatagcgcgccgacccatgagcagagcaccgcgatggccagcatcagcgtaataaacaccgccggacgcgggccgaagggcaggggaaacccggcctgctgaccgtgcagccaggcgcaggcggcgagatagccggccagcgaaaccggaagcgtcaccagcgcctgagcggtagcccacatcattggcggttgatgcgggttctcccgcagccagcgggcgttgcgcagagcataccaggcccagcagaccaccgatcccagcgccagcgcaatgccggagccgtagcgccacgggctaaaattcggcagcccctgacgcagctccgcgacgttaacgcagatcaggcccacagcgatgcagatcagcgccggaaacaggcgccgccacggcagcttcccgtcgcgctggctgtagagcagattggcgaacaccggcagtaccaccggcagcgtgccgataatcatggtggaaaccggcgccccggtgcgctgaatggcgctggccaggcagacgtaatagataaggttccccatcattgtcaggcccagcgcggtccaccagtcgtgccggctcaactggcgcagtcgcgcgcgcccgagccacgccagcggcagggcgatcaggcccagcgccagatagcgtcccatcgactgcagcatcgccggatactctggcaccagcaaaggcccgacgaaaattaaaccccacatcagccccgccagcagggcgtataacacaccactaatcatcattgcatccgttgtcattaccgttgtctgcagtgtagaagggggtcgggcaggaatattgtatgagattgcgcattagcgcctggcgacctgcttctgatagcgcaccggcgtaatgccgtaacgctgggtgaaggcgcgggtcaggtgggactggtcggtgaggccgacggctatcgccacttcggcggcgggcatgccgtgggtgaggaacgctttggcgcgccacagacggatggccatcagcatctgatggggcgttacgtgatagtgggctttaaactggcgctgaaagtggtacgggctcagcgccgccacctgcgccagctcgtcgagggtgatgggacgcatatagttatcgtgcaggtagtcgcgcacgcggtcaaagcgatgcccggcctcaccttgcgcagaggcatggtgggccagagggcggaaggcgtcgatgaggtcgagcagcagtccctgctgggccagcggatcgtcgctatgccacaggccataaatcagctggccaatttgtcgggaacgcaggggatcctcgcggaccacctcgctgaaccaccagtctcgcaccccggtgatggcttcaagacggtccggctccagataaatcatccggtagcgccagccgtcggcggtttccgcttcgccggtgtgcagctcgtcgggattcatggtgacaatggagtttgcggcggcaatatgctgactgccgcggtagcgaaagcgctccgcgccttgctcaatcacgccgatgccgaaggcttcgtgggtatggggttcaaaggcgtagcgggatatatgggcgtggtaaagctccaccccgggcaactgttcgagatggcgaaagcgcgcgcggtctttttcatcactaaattggagtggtacgccctgcatgcctgcctcccgacggttatcccttcaatatgggagaggaaccgccgggacgcaaccgcaaaagctgagaggggcggttacagaatgcctttcacgctttcagcaagggaggtggtcgggcggccgatcagcgtactcagggtgcggctgtcgtcaaacagtccgcctttcgacgcgccgacatcggaatccgccagcatatcggcaagcccggccggcaggccgacgcttttcagcgcggcggcgaaatcggcttcgctgaggttctggtagaccacgtttttcccgctttgcttgctcagctcggcagccaggtcgctcagcgtccaggcgttatcacccgccagttcgtaaattttgccttcatgaccctcactggcgataacgcgggcggcagcggcggcataatccgcgcgggtggcggaggcgattttaccctcgccggcggcgccgataaacacgccatgctccagcgccggcggcgcgctggccagatagttttcggtataccagccgttacgcagcagggcgtaagcgataccagagtcggccagcatctgctcggtttcgatatgctctgcggccagacccagcggcgaagtgtcggcatgcagcaggctggtatacgcgatgaatttcactccggcggctttggcggcgttaatgacgttgcggtgctgtacagcacgctggccgacttcgctggaggagattaacagcagtttatccacgccctgcagcgcggcggtcagcgccgcttcgtcgctgtagtcggcctggcggacaaccacgccctgctggctgagcgcctgggctttggccgggttgcggacaatcgccacaatctggctggcagggacggtgttaagcaggtcttgcagaacgtagtggccaagctggccggtggcaccggtaagagcgatcatgggtcttctccttcgtgtttattggcagttgtggtaagctaccaccttaactaacttttagtaagtacgtacaaaaaggtaagtgtgaaatggccgaaccgacgctgagcgagaaattgcgcaccggcaatttgtttgcggaacagtgcccgtcgcgcgatgtgcttaaacatgtcaccagccgctggggcgtgttgattctggtggcgctgcgcgagggaacccaccgtttcagcgatctgcgccgtaagatgggcggggtcagcgaaaagatgctggcgcagtcgctgcaggcgctggagcaggatggttttatcgaccgcgtctcttatccggtggtgcccccgcacgttgaatatagcctcacgccgctcggcctgcaggtgagcgagaaggtggccgccctggcggactggatcgaggttaatctgccctcggtgctggctaaccacggggagtgaaaatgtatcactccctgtagccccggtaagcgcagcgccgccggggaacaggcattacttgctcaaatccagctgataaatggcgaagccgatatcatcggtggccacctggcgcattggatactgcgctttctctttgataaacgccgcggctttgtcgccaggcgaggtctcaaaacgaatatccaacggcgtgttgctgtggatcggcgccagacgccagttgttatccgccgccggatggatcgcgccttccttcttcgattgcgcgccaatccacgccgccagcaccgaacggttttcatccggtgaggcgaaggcgatatggctctcaccggtgccggcgaatttgccgccgtaagcgcgatagttattggtcgcgaccaggaaagtagcctgcggatcaaccggttttccattgaaggtcaggtgcttaatacgctctgcctgcggatggatcatctgacattcgccgtcgtagcgggccggctgagtgacgtcgatctggtagttcaccccgtcaatgacgtcgaagttgtaggtgcggaagccgtcccagttgatcagcgactgcggcttgctgctggcgggatcgatctggttaaactgtccggcagagcattccagccactccttaacctctttcccgctgaccttcatcaccaccagggtgttggggtagagatagaggtcggcggcattgcggaaggtgagctggcctttctccacttcgacaaagctcgccggatcgtttttacgcccgccgactttaaacggcgcggcggcggagagcaccggcagcttcgccagatccgggtcgccctgaatatagtgttctacgtaggctttctgcgccatgttgaccacctgcaccgtcgggtcgtcctgcaccagcgccagatagctgtacatgttgtcggcggacttgccgatcggcttgctgacgaattcgcgagtggcgtcatgatcggctttcagcaccgacaccagcttgccatcttcggccgccagtgatttcttcgccaccgcgtcatagattggccgcgcttccgctttactctgagttacctgccatttaccgctgtcgttatttagcaccagatcgaccaccccgagatgatcgccccacattcccggcatcaccgccggtacgccgtttagcgtccctttggcgatatccgcgcctttgatgttggcgaagtctttacccgggaacaccgcgtgggcatggccgaacataatggcgtccacgccgggcacctggcttaagtagtaaaccgaattctcggccatcgcctgatacgggtcggcggagaggccggagtgagcgaccactaccaccacatcagcccctttcgcccgcatctccgggatatatttgcgcgcggtttcggtaatgtcattgaccgtcaccttgccgttaagattagctttatcccaggtcatgatctgcggcggcacaaagccgatatagccgatgcgcagggtgtggatttgaccgtcgctgtccacgacccgggtatcctggatcaggtacggcgtaaacatcggttttccggttttggcatcgatgatattggcgttcacgtaggggaacttcgccccggccagcgccttgtgcaggaagtcgagaccgtaattgaactcatggttgcccagattgccgacggcgtaattcagggtgttcatcgccttatacaccggatgtacatcgccctctttgagcccttttgccgccatatagtcgcctaacgggctcccctggatcacatccccgttatccaccagcacgctgtttttaacttctgcccgcgcctgttcgatcaggctggcggtacgcaccaggccgaatttctccgtggcggcatctttgtaatagtcgaagtccatcatattgctgtgcagatcggtggtttccatgatccgcaggtcgaccgtcgcggcgttgacgctggcggcgatcagcgtggccaggagcgttgcgctaaacttaatcatcagaggcgtccttttttatgagcgatagcacagaagaaaatgtatttatattctgttgcttacagaaatgtgaatcttgccagaaaagcgggcagagaaaccgccatcgttatcacagatagcggaactcgcggtgatgcgatataaataaaacaacgagttaacgccactgtaaccagacgaggtggagaatgttagaacaagtatgtcagcttgcacggaatgcgggcgatgccatcatggaagtctacgatggaaaccagccgatcaacgtcgccagcaagaaagatgattctccggtcacggcggcggatatcgcagcgcataaagtcattgtcagcggcctgcaggcgctggatccggataccccgatcctctccgaggaggacccgccggcgtgggaagtgcgccagcactggcagcgctactggctggtcgacccgctggacggcaccaaagagtttattaagcgtaacggcgaattcaccgtcaatatcgcgctgattgaaaacggcaagccgacgctgggcgttgtctatgcgccggtgatgaaggtgatgtacagcgcgcaaaatggcaaagcctggaaagaagagtgcggcgtacgcaagcagatccaggtccgcgatgcccgtccgccgctggtggtgattagccgctcccacagcaacgatccggagctgcaggagtaccttgagcaacttggcgaacaccagaccacctcaatcggttcgtcgctgaaattctgcctggtggcggaaggtcaggcccagctctatccgcgcttcgggccgaccagcacctgggacactgccgccggccatgcggtcgcggtggccgccggggcgcatgttcacgactggcaggggaaaaccctcgactacacgccgcgtgaatccttcctcaaccccggcttccgggtctctatttattaagcaatttatgcagcaggtcgatcacctgctgcacctcttgttgggtgagggcgccgtctttagcccactgcacacgcccgttcttatccagcaccacgatcgctgagctcttctcgtccagctgccaggccttccgcaccaggccgttgctgtcgacgataaattgcgaccatgggaagagctttttattactttcaatgctgttgcgtacaaacatcccggtgcccgggatggcgtcgtcagtgtttacaatggtggtggtctgatagcgatcgtgcgggaagcccgccgctttaatcgcctcgatcaggttggcattcttctcttttgctgacgagcgtccggcgatgtgctggaccacgcgcacttttcccgccagctgggcgctattccagtttttatagctaaacttatccttatccagaataagctctccccgatccgcgacgccaacgggcgccacgcgctggccgtcgacgaagttatgcgctgtggccagcagcgggagaagcagtaacgaggcggccagtatgctacgtagggtcatgcgcaatccttaatcatttttatgcaggtgatccgaccacttggtctcgtttaatcataagtgcgattggcggtgattacccgcaatgaggatgccagtttgcgtgttgacgcacaaattagtcgtaaaacggcgacttatacttacttcatcgtatgtctgaaacgaaaattctgaattattgtcatcaaagggtaaataaacttatacatactgggtccctctgagattctggactatagttttagggcattaaaatttgcgctcccaagacgtgggctaactgtggcaccacaagagcgtaaccctggcaggagagaagaatgaaaattttccaacgctacaatccgctgcaagtggcgaagtacgtgaagatcctgtttcgtggacggttgtacatcaaggacgttggcgcatttgaatttgataagggcaaaatccttatcccgaaggtcaaggacaagctgcatctgtcagtgatgtccgaagtcaatcgtcaggtgttgcgtctgcaaactgagatggcataacctggcacgtagcagtacgtagtaggtaaaagacggctcccgatgggagccgttgatgtttttagcccttcatttccgcatagcgtttgcgatattcgcccggtgggatgccgttatgtttacgaaacaagcgggtgaaatagaccggatcgctgtagcccaccgataaagcaattttgttaagtgggagcgaagtgctctgaataagccacctggcgcggttgatgcgctgcgtttcccgccacgcatagaccgtttgccccagttcatttttgaaaaggtgcgccagacgtgaaggggagataaacaccatcgccgccagagtctcgatttttacctcctgcgcaatatgggcgttaagatagtcacagatggcgttaatccgagggtcgtgggcatggcggttgctaatgggttgctgttgaaaacagcggagaattaatctctccagcgcgttcattgccagcgcttctgacagcggtacggacgcagagtggtggcgtatcacttcgtagaacagatcgcgcagttgctggagctggtcgggatcgttaatggttgttttgccgataccgtgggtggtttggtcccacttcagccagtctatccagtaggggcgggggataaagtagatccacagatggtcccagtactcgctgtgttcgtccctgccgtaatgatggggcacgccgggaggaaacagcaacagatcgttttcccggcacagcaggaagccatcgcccgctttcgcccgcgcctggccgcgcagggtcagattaatgatgtaacctttcatcccctgcgggcgattaatgtagtagtccagcgtggagccgcgggtaatcggcgtgaagcctgcgacgacccaggcattgaaggtaaaggtcttcatcaatggcgagaaattgagtagctcattgatatccagttccattctctcttccacctgagcgccgccgcgtcgttagctttcgatgatagtaaattcccaggccctgaggcgcaacggctggccgacgtatactgtctccccgctcagcagcgcggtacccagggtctcgctgacaacatccatcgcctcgccggagtaattgaacaggaagtggatattatttccggcgcggttacgcatctttttaaccactaacggatagcgataggcggaagttcgcgagttcagcgtgagatccgccgtcaggacatcaaacagctggctaatcaggcccttctgcggcagaaatccaacgtacagggcgcgaccctgaccgtaatccgcctccgttgcggcggcgtattcgccccatgccgggtgctggtagcgcagcagggtgcgggtcccgtcatcgggcgtcagcaattccatccacagctcagcctgattgtcattgcggcaatcaatctctgcgcagcaagagcttaccgtcgtctcttccggcagggtgaactggctgtagctgacgccgcagctctggcgcaaaacccccggctgcgcgctgctgcgcaccttgacgttttcatcgctaaagcctgatttaaagccgatcagcgctctgccgccccgggcgatatagtcgttaatccgcgttagcaggccctcatcggcggcgtacagaccaggaacgatcagcacccggtagcgcgaggtttcctcgttcacatcgtggatgatgtcgaggctgatattgtggtcatacagcgcatcgtggaagcggcggaagatatcgttataaatgttgcccctggcgtcgccgggaaggaagtgattgagagcgtccatcgcctcattacttattagcaacgcgacgtcattttcggccttcagctccgccagctgcggggacaggcgggcgaaatcggcgccgatggtggtagcttcctgccaggttgggttgcgcgagaagtcgtggctgagcagccccttccagtaggtttcaaaggcgttatgaatcgaatgccagtgccagtaggagaccatggcggcgccggaggcgatatggctgaatgcctgcaggcgtagctggcccgggaagggggtccactgggcgaagccctgagcctgggtttccagcacgaagtagttctggcccggcttaagcgagcgggtgatggcgccgccaaaggcgatttcccgtccggtcaggtgtgcctgactcgggtgatagatatcgacgccggcgatatccagcgcctgcgccgccgcaaaatggtcgacccgcggctgcacgccgtaagagtaaccgcgccattcgaaatcgaagttgtgggtgacgaactggtgcggctgggcgtattcccgaacgatggccgcctgccaggccagatactcggtgacctgctgacgctgatagcgggagaaggcgcaggcgaggctggcgttgatggtgttttccaccggcggaaaatcctgccagcggtcaatgcggttgctccagtaatccaggccgaaatcgtgattcagctgcctgaggtcaggatatttctcctgcaggctgcgcacgaagccctcctgcatatagcggccaatattgtcgtaatgcttggtttcgttatccagttgccagccgataatcgccggatggtgttgcacatgggccatcagcgtgcggataattttttcggcatagcggcgaaaggtcgggttgacgatatccatgatctgccgcggaccatatttttgctgccccgcgacggtggtgaccagaatatcgggatgtttcgccgccagccaggccgggaccgcgtaggtgggcgtcccgacgatgaccgcaatgccggcctcatgcatcgcctccagcacccggtcgatatggtagaaattatactggccctcttcaggctccagcgtactccaggtggactcggcaatacgcaccacgttaatgccggtttcgcgcattaaggcgatatccttagccagccgatcttccggcatatattcatcgtaatacgccacgccataaaataaatgagacatacacactacctcctacattaattcgcgggcaccggttgtgaagagaagacacgcgctttatccagcgtaataaaagaaataagcgtgaagcacagagcgataccgccgagtacgatatagctactggtaaagcccatgctctggtacatatggccgataccggtcgagagaaaaatagagctaaagcttttcgaaaattggaagccaattaagtaaacggtcgctgacagcagaggattaaagttagccgtaatatattttaatgccgcgacaagtagcaccgagctttcaaaaccgtggaggagtttaatcagactgatggagacagggccaatagcccacgcggagccgataatacgcaagctcataatcagcccgcagtataacagcgcatttttcgggccgattttattcacaaaccatggcgcaaagaacatcacgatggcatcaaggaaaatctgacccgtggttaaataaccgaagacttctgcaccccgggctttactctcaaagaaatggctgtaatagatagcgaactgctggtcataggtttcatagaccgccccgacgccaatgacatagagggcgaagaaccagaattttttaatttttaacagcgagacggcatcgcggagggtaaccggcgatgctttgccggacagccgcccctgctgagggtgggcgctgatctgcattttccagacaatcgccataagacagacgcctgcgccgctggccaaccagaaaatcatattctgatcaatgccgtagagttttcctgccgcaaaggtaccgatcgcagcgccgatgccaccgaacatccgcgcccgaccaaattcgaagccggaggcgcggctgactttatcaatgtaggcttcgcaaatcccgcagccggcgccgtaggccatgccaatataaaggccgccagccagcgcgccgaagaacacatttatttgtaacaggggagcaaagacataaatccagtaaggggcgaataacgtgataataatcgccagcatccacatcagattcttacgatacaccagtttatcggagatgaagccgaataatggctgaacgcagacggcgacaatggcggtgaaagaataaaccaggccgacgtctgtgtagttaataccgatggtttccgtcaaccacagggataaataagggtagcagcatccccaacctataaagaagaacaggaaaaacagacagctgataaagtaatttttatttgacgttatcatggtaaccctcgcttcctttattcaggaatatgatcgtgttgatgcgagcaacgttacctttttgcgcgtcggggagtcatgaacgtttcgctatcgagcaggagtaatctgctatcggcagaggggcgtgagccgcttcacattcgagccataaaaaagggcggatggtcatccgcccttaggagagagaaaagattacgctcaggcgttctggctttccgccgtttccgcctgcttcggcaccagcaccgttggcttgttatcgatgcgggtcaccagcagctggtcgatacggtagttatcgatatccacgacctcaaacttatagccggagaacttcactgcgtcggtgcgtttggggattttacgcagcataaacatcataaagccgccgatggtctcgtaattcccggactgcgggaactcgtcgatatccagcacgcgcatcacgtcatcaatcggcgtaccgccatcgatcagccacgagttttcatcgcgggcgacgatctgctcttccagcccctggccgacgaggtcgcccatcagggtggtcatcacgtcgttgagagtgatgatcccgaccaccagcgcgtattcattcatgatcaccgcgaagtcttccccggcggttttgaagctttccagcgcttccgacagggtcagggtgtccggcacgatcaacgtgttgcggatctgtacgccgccggtcagcaccaggctctggttcgccagcacgcggttcagcagatcttttgaatcgacgtaaccgataatgtggtcgatatcttcattacagacgaggaacttcgagtgcggatgttcggccactttattcttcaggctctgctcgtcttcgtgcaaatcaaaccaaatgacgctttcacgcggggtcatggaggaaggaacggtgcgggactccagctcgaacacgttctcaattagctcatgctcctgcttgcgcagcaccccggccagcgcgccggcctcgaccacggcatagatatcatcggaagtgatatcgtctttccgcaccatcggcagtttgaagatgcggaagatcatgttggccatgccgttaaacaaccacaccagcgggcggaagactaacaggcagaagcgcatcgggttgatgatgcgcagggccactgtttcgggcgcaatcataccgatgcgtttcggagtcaggtcagcaaacaggatgaacaagctggtgaccagggtaaaagagatgatgaagctcagctgctcggagagctccggcgacaaatacccgctgagcaggctatgaaacgccggtgagaaagccgcgtcgcccacaataccgccaagaatggcgacggcgttgaggccaatctgcacgacggtaaagaaggtgcccgggttctcctgcatcttcagcacccgctgtgcgttgacgttgccttcatcggccagcagtttcagtttgattttacgtgaggctgccagtgaaatttccgatatcgaaaaaaacgcactgacggctatcagacagagtattactaaaatactgtttaacatatcttttctgaccgttgaggccagatcctcggaagggaagttgataactcaaatgtggaatacataaaaaaccggtccgaaggcgctggaccggctgtcacactggctagtatagcgtaagggaatgtaaagccgccagagcgttcattgaccgcctcgctgttgaggcggaaatcagaattacgcttgaggcggcaggcagacgccaatgccgccgatgccgcaatagccgtgcgggtttttatacagatactgctggtgatcgtcctcggcatagtagaacggtttggcggtggcgatctcggtggtgatgtgacgggtatcgtgcgcgtcgttcatcgccgcctggaagcgcgcgaggctggcctttgccgcctccgtctgttccggggtcagcgggtaaatcgccgagcggtactgggtgccgtggtcgttaccctgccgcataccctgcgccgggtcgtgattttcccagaacacctgcaataactgctcatagctaatcacctgcggatcataaaccacgcgtaccgcttccgcgtgaccggtctggccgctgcatacttcgcgataggtcggattgggcgtatagccgccagtgtaacctgcggcggtgctgtaaacccccggcaattgccagaacaggcgctcaactccccagaagcagcccatggcgaacagcgccacttccatccccgccgggacgttggtcatcgagtggccgttaactgcgtggagcgtcgccactggcatgggggtattgcgtccaggcagcgcatccgcctgggcgacaagatgcgttttatcaaatagactcacggttggcctctcaatacagaaatcgtcgttaaggttgtaacgaagcgtgtcttttaacacaataaatacgcgtaatacgtctagattaatacataagaattatttgggttattgccactttttcaaccctatgttgttagggttttgttaagccgtggagcggcgccagtgtttcctgtagaggaaacagggatattcaggagaaaatgtgctaaaaatccgccagttatgtgtcaccagccttttgctggtcagcggggtcgccagcgcagcgaatgtgcgtttgcaggttgagggattatccggggagctggagaaaaacgttcgcgcccagctttccaccatccagagcgatgaagtcacgccggatcgtcgctttcgcgcgcgcgtcgatgacgccattcgcgaaggtctgaaagcgctgggttattacgagccgacgattgaatttgatttgcgtccgccgccgaaaaggggacgtcaggtgctgatcgccaaagtgaccccgggagaaccggtgcgcattggcggaaccgaggtgattctgcgcggcggcgcccgcaccgatagcgactacctggcgctgctgaaaacgcgcccggccatcgggacggtgctcaaccacggggattacgacggcttcaagagctcgctgacccgcgtcgccctgcgcaaaggctactttgacagcgagtttcttaagagccagctcggggtctctctcgaccgtcatcaggcgttctgggatatcgattacgacagcggcgaacgctatcgctttggccacgtcactttctctggctcgcaaatccgcgatgaatacctgcaaaacctcgtgccgtttaaagagggcgactactacacctcacaggacctggccgagctaaaccgccgcctggcggcgaccggctggttcagttcggtggtggtggcgcctgattttgctaagtcgcggaaaaccaaggtgctgcctctgcagggcgttgtctcgcctcgcaaagagaacaccgtggaaaccggggtcggctattccacagacgtcggtccgcgagtgaaagccacgtggaaaaaaccatgggtcaactcgtatggccacagcctgacctccagcgtcagcctctccgccccggagcagcagttcgactttacctataaagtcccactgctgaagagccccctcgaacagtattatctgatgcagggcggttttaagcgtaccgacctcaatgatacccaggccgactctaccaccctgggggtctcgcgtttctgggagatgtcgagcggctggcagcgagcgattaacctgcgctggagcctggatcactttacccaggcgaacgtcaccaacaccaccatgctgatttatcctggggtctcggtgaaccgcactcgctcccgcggcggcctgatgcctacctggggcgattcccagcgctactcggtggattactccaacaccatgtggggctcggacatcaacttcatcgtgatgcaggcccaggacgtctggatccgtaccctctatgaccgccaccgctttgtggtgcgcggcaaccttggctggatcgaagcggacaactttgacaaggtgccgccggatctgcgctttttcgccgggggcgatcgcagtattcgcggctataaatacaaatctatctcgccgaaggacgatgacggcaagctgatcggggcctcgaagctggccaccggctcgctggagtatcagtacaacgtcagtggtaaatggtggggcgccgtgtttgtcgatagcggcgaagcggtcagcgatattcgcgagagcgatttcaaaaccggcgccggggtaggcgtgcgctggcagtcgccggtggggccgatcaagctggatatcgcccggccgatcggcgacaaagaagagcatggtttacagttttacatcggtctggggcctgaattatgagtttatggaagaagataagcctcggcgtcttaatcgtgttggtgctcctgctgggaaccgtcgggttcctggtggggaccaccaccggcttgcatctggtgttcaaggcggcggatcgctgggtaccggggctggaaatcggcaaagtcaccggtggctggcgtgatttaaccctcgataatgtccgttacgagcagcccggggtggcggtcaccgccggtcagtttcacctcagcgtcaggttgcgctgcctgtgggacagcagtctgtgcgtaaacgacatcgcgctgcgcgatatttacgtcgccgtcgataccaagaagatgccgccctcagcgccggtcgaggaagaggacagcgggccgctgaatctctccactccttatccgatcaccctcagccgcgtcgcgctgcataacgtcaacgtcaaaatcgatgataccgcggtctccgtacgcgacttttccaccggcctgaactggcaggagaaaaatctgaccctaacgccgacctcgctgcaggggctgctgatcgccctgcctaaggtggcgaaagtggcgcaggagcaggtggttgagccgaaaattgacaacccgcagccgcaggaaaaaccgctcggcgagacgatgaccgacctcttctcgcagccggtgctgccggcgatgaccgatgtccatctgccgctgaacctcaatattcaggcgttccgcggcgagcagctgcgcctgaccggcgataccgatatcaccgtgtataacctgctgctgaaagtcagcagtatcgacggccagatgaagctcgacgcccttgatatcgactccgatcagggcaaggtcagcgcctcgggcagcgcgcagctgcaggataactggccggtggacattaccctcgccggaaccctgaacgtcgacccgatgaaaggggagaaggtgcagctggaggtgggcggcgaagtgcgtaaaacgctcaaagtcggagtggacttaagcgggccggtcgcggccacgctgcgcgcggatgcgcagctggcggaggccgggctgccgctcaatatggaactgaagagtaagcagctcgcctggccgttcagcggcgagaagcagttccaggccgacgatgtccagctgaagttcagcggcaaaatgaccgactatgcgctggacttctccaccgcggtgaaaggtcaatcgctgccgccggcgaaaatcgccctcaacgccaaaggcaatgaacggcagatcaatctcgacaagctgacggtcaatgccctggaagggaaaaccgagctgaaggcgctgctcgactggcagcaggcgatcagctggcgcggcgagctgaccctcgacggcatcaacaccgccaaagaggtgccggactggccgtcaaagcttaacggccggatcaagacccagggcagcctgtacggcggcagctggcagatgtcggtgccggagctgaaaattaccggcaacgtgaagcagaacaaagtggatgtggcgggctcgctgcagggtaacagctatctgcagtggaaaatcccgggactgcatctggcgttaggcccgaacagcgctgatatcaaaggcgagctgggggtgaaggatcttaatctcgacgccaccatcgatgcgccgcacctggataatgcgctgccggggctcggcgggacggcgaagggcttggtaaaagtgcgcggcactgtcgatgcgccgcagctgctggccgatatcaccgcccgggcgctgcgctggcaggagctgaccatcgcccaggtcaacgtcaaaggggatgtgaaatccaccgatcagattggcggtaacctggacgtgcgggtggatcgcatcagccagccgggggtcaatatcagcctggtgcagctcaatgccaaaggtacagagaaacagcatgagctgcggctgcgcgtgcagggcgatccggtttccggccagctggcgctggcaggcagcttcgatcgtcaggccgaacgctggaagggctcgctgagcgatacccgcttccagacgccggtggggccggtagcgctgacgcgcagcattgcgctggactatcgcaatctggagcagaaaatcagcatcgggccacactgctggaccaacccgaacgccgagctctgcgtgcctgaaaccattgacgcgggcgccagcggacgggcgcgggtgaatctcaaccgcttcgatctggcgatgctcaagccgtttatgccggaggcgacccaggccagcggcgtgtttactggtaatgccgatgtgagctgggacaccaccaaagagggactgccgcagggcaaagtgaccctcagcgggcgcaacgtcaaggtgacccaggtcgtcaacgacgcgccgttgccggtggcgttcgatacgcttaacctcagcgccgacctgcacaacaatcgcgccgagctgggctggcttatccgcctgaccaacaatggtcaactggatgggcaggtgcaggtcaccgacccgcaggggcggcgtaacctcggcggcaacgtcaatatcagcaacttctcgctggcgatgatcaacccgattttcgctcgtggtgaaaaggcagagggaaggctcaacgcccgtctgcgtctgggcggcaatgtgaaaagtccgcagctgttcggccagatgcagctgagcggggtggatatcgacggcaactttatgccgtttgatatgcagccgagccagctggcgatgaacttcaacggcacgcgctcgaccctgcaggggacggtgaacacccgccaggggcaaatcgccctcagcggtaacgccgactggacgcagatcgataactggcgggcgcaaattgcggcgaaaggcagccgggtgcggatcacggtgccgccgatggtgcgtctcgatgtatcgccggatgtggtgtttaccgccacgccaagcctgttcaatctcgacggcaaagtggatgtgccctgggcgcggatcgtggtcaacgaggtgccggagagcgcggtcggcgtctcctctgatgaagtgatgctggataaaaacctcaagccgattaagcagcagagcgccagcatcccgatcaacagcaacctgaccattcacgtcggcaacaacgttcgtctggaagccttcggcctgaaagcgcgtctgaccggtgatttgaaagtggcgcaggacaagcaggggctgggcctcaacgggcagattaatattccggacggccgtttccacgcctatggtcaggacttgattgtccgcaaaggggagctgctgttctccggtccgccggatcagccgttgctgaatatcgaagcgattcgtaacccggatgccaccgaagacgatgtgatcgccggcgttcgcgtcaccggctccgccgatcagccgaaagcggagatcttctctgatccggttatgtcccagcaggaagcgctgtcttatctgctgcgcggccagggtttgagtagtggtcagagcgatagcgccgcgatgacctcaatgcttattggtatgggggttgcacaaagtggtcaggttgtgggtaaaatcggcgagacgtttggcgtaagcaacttggcgttggacaccgaaggggtaggcgattcttcccaggtggtggtcagcggctatgtactgccgggtctgcaggtaaaatacggggtcggtatcttcgattccctggcgacgctgactttacgttatcgcctgatgcctaagctatatgtggaagcggtgtctggcatcgaccaggcgctcgatttgctctatcagtttgagttttagcaatgcgaatatttgtttacggcagtttacgacgcaaacaaggcaacagccactggatgaccaacgcccagtggctgggcgctcatagtgtcgacgattatcagctgtacagcctgggccactatccaggcgcggtgcccggcgaaggcacagtacatggtgaagtttatcgtattgatgcatcgacgctggccgaactggatgcgctgcgcaccaaggggggcgagtatgcgcgccacctgattcagacgccttacggcagcgcatggatgtatgtctatcaacgttccgttgagggttgtacgttgatagcgaacggcaactggttggatcgcgaccagtattaaccacgacagcgccaccttcgggtggcgttgttttttattacttcagttcccatggcgtcattctggcgccctgacgtctggcataacgtaatatggcctgatgtaccttcactctaccggccacccgacgtgacaggggatgggcaatcatacggacaaactccatcactattaacagcaggttaatcgggagcagggtgcctgtcagcctggtaagcatttcacgataaaatggccaactgcccagattaagcatggggtcgtgcagtttgatggtgagcgtaaaaaacatcactatgagtacgaggccgtacgcgattttataaattgatgccatctgctgattgccgggatgaaaggggctattttttaaataaacactgccatcactgacattgtataacgcctgaagatcatcgtatccatgccggcgtgcggcgataacccagtccccatcggcaagaaatggcgggcgacaacgattattcagggcatcgctcagccaggtcaagtgcgctgaaaaaaacgagtgacgagtcgccagctgaaaacaggcgccttctttgataaaataaggccttaccctcgtagcgaaccatatttgataataactattcagaatcacgccttcttcaagcgcaaattcttttggcagcgctatctcgttgttggccgatggtggatgcctttcagaagtagcgggtagaatttccagacgctgacagaatgaaatatcgccttgcttcgttcgctgcattttcgcattgagaacacgtaacctgagtgagaaattgcaagagcaaaaagagaagatgccgaagggattcaccaacattgtgataaaacataataataaaaaaatatccaaccatggagcacaagcgagaatgatcaagcaaacaaaaaagaccaagccgacaggtcgaagaagctttttaatactcagcggctgccgggaaggttcgagcaaaatatggccatcgcttaaccagtggatccagtaactgccatcctttaggcggcaagtgccgatatgtagcggctggccgagcctcagacggtcaaaaagcgaggggtctttaaaatggcgtttatcggtataaaaggcatgctcgcctgcaatgaggcgtaaatagctttgctcttccgaggcggcagtggtgaagccggtaaaattcacggtgaaataatgggtctgtttcacaaggttccttccttgatgaaatgatggtgttttacgtatcacgcgttgccgacccactccttaccagagcgggagatgatccttcgccagccacatcgcggaagccaacgtcgtcagcgcgaggaataataatcgtcgtgttggggtgctgaacattacatgatctcctcgagcgcggtatggcgggccgctccctgcaggtagtgccgcatcgccgagcgcatcttcatccagtcagccacccggtgtgacaataaccaggccgtcgggccaatcagctccagtaccgccaggatcccgccgaaactgagtaataatagggacagcatgtccagtgaatcctgaattaaccacccaaatcccctggctggtttgtatgggttatttagcgacatgccgagtatgaggaggtacatcaccagcaccatgccataaaacaggttatagactagcgacatttgccggtcaccgggataacagggatgatttttcagaaaagcgcccccgtcgctgacgttgtataacgcctggacgtcgttatctttccgttggtagacgacgactatccgatcgccgatagcgagaaagggcggttgacggcggtaaaaaaagggatgcaggccgaagttggcgaagccgttctgccagaagaaggccagcggcgccgtgtcgcattgtatcccaacgccatggtattcccgcgttgggttccccgcgaaccatttcttaaaaatgatattgctaatttttcccgtccggacggcatagcgttccggcagggcttgcgtaaaaggcttcgccgactggcggagggtttgcgccgtagtcggtagcggctggcaaaaggaaaagtcgcggcggcgggcctgcgccatcttcgccaacagatcgcgcatggcggggtgcatttttagcgcccggtggaacagtagctcgcagaggccggttaacaacgcgatgaaggccagtatcgcgataatgccgaagccgaaccttccccattctgaggtgctcatcatgagcgggataagagcgacgatgagcgtcagcaggctgatactcagcagcggccgggcccagcgctttacccgttgactgggctcaaggagcgtttcgccatcgctgagccagtggatccagtaactgccgttgtccaggcggcggacgccaaggtgcagaggctgattgatcgtcaggcggtcaaaaagcgaggggtcgttaaaatagcgtttatcggtataaaagacatggtcgccggcgataagacgcagatacccctgtttttcacaggcggcggtcgtgaagccagaaaagttaagggtgaaatagcgaatgcttttcacgggacaccctccatggtgttatcgcggctatccgtgccgcaatcaggcaggggatgaccctgcctgagacagaattacttctgcttagcgcgctcgaaagaggcaacgatttcggctttagccgcttccgcgttgtcccaaccgtcgactttaacccacttgcctttttccagatctttgtagtgctcaaagaaatgagtgatctgggctttcagcagttccggcaggtcgttcacatcgttgatgtgatcgtattctttgctcagcttggtgtgcggtacggcaaccagtttcgcatcttcaccagattcgtcggtcatcttcagaacgccaaccggacggcagcggaccacggagcccggctgcagcgggtacggagtcgggaccagcacgtcaaccgggtcgccgtccagggacagggtgtggttgatgtagccgtagttgcacggatagaacattgccgtggacatgaaacggtcaacgaacagtgcaccgctctctttgtcgacttcgtatttgataggatctgcgttcgccgggatttcgatcacgacgtagatgtcttccggcagatctttgcccgcaggtacgttgagtaagctcatgtctgtttcctttaaaatgtatggcaaacaagtgctcggtattatagccaactcacatcgaaagtcttcgcttctttttcccgatatcgccgcagagtgctccgaatttttcgcgtaataatgacatgaaaatccataaacatagccacatcatgaataaatttatgtaaccgttttcattgcatgtgattgatttatcatactgcttaaaaaaacgtcacaaaccgcaacagccgcgctccctgcgaagccttatcggctctccgctgggcagtagggccatcattaacatctcatttacttttttgaagtgtgatgtaacgcattcagttacatcaccgattgtctatagtttgtccgcaggtgagactttaaccaacaataaccctacgaggatacccttatgtggaagcgcttacttcttgtcacagcagtttccgcagctatgtcgtctatggcgatagctgccccgctaaccgtaggtttttcgcaggtcggttctgaatccggctggcgtgcggcggaaaccagcgtcgcgaaagaggaggccgccaagcgcggtatcaccctgaagatcgctgatggtcagcaaaaacaggaaaaccagatcaaagcagtgcgttcctttattgctcaaggggtcgacgcgatcttcattgcgccggtggtggccaccggctgggaaccggtgctgaaagaggcgaaagaggccaagatcccggttttcctcctcgaccgttccattgatgttaaagataaagatctctacatgaccaccgtgaccgccaacaacgtgctggaaggccagctgattggcgactggctggtgaaaaccgtcgacggtaagccgtgtaacgtcgttgaactgcagggcaccgttggggccagcgtggccatcgatcgtaagaaagggttcgccgacgcgattgccaaagcgtcgaatatcaaaattatccgctcccagtccggcgacttcacccgcagtaaagggaaagaggtcatggagagctttatcaaagctgagaataacggcaaaaacatctgcatggtgtttgctcataacgacgatatggccatcggcgccatccaggccattaaagaagctggtctgaagccgggcaaagatattctgaccggctccatcgacggcgtgccggatatctataaagcgatgatcgccggagaagccaacgccagcgtcgagctgacgccaaatatggccggcccggcgttcgatgcgctggagaaatataaaaaagacggcaccctgccggagaagctgaccatcaccaaatcgacgctgtatctgccggatacggcgaaagaagagttagagaagaagaaaaatatgggctactgagtggggagcccctcattccatccctctccccggtgggagagggtaaaaagcagcgttccagaaaccccgggaagcccagcgcgacccggggtaacctgacatcatttgaaggtgacatcgattatgagcgccgaggcacaccaggagatccttcgcaccgaaggacttagtaaattcttccccggcgttaaggcgctggataacgtcaactttagcctgcggcgcggcgaaatcatggccctgttgggcgaaaacggcgccggaaaatcgacgctgatcaaagcgctgaccggcgtttaccatgccgatcgcggcactatctggctggaaggccaggctatttcgcccaaaaataccgcccatgcccagcagctggggatcggcaccgtctaccaggaagtgaacctgctgcctaatatgtcggtggcggataacctgttcatcggccgtgagccgcggcggtttggtctgctgcgacgtaaagagatggaggccagggcgacggcgctgatggcctcctacggcttttccctcgacgtgcgcgagccgctgaaccgcttttcggtggcgatgcagcagatcgtcgctatctgtcgggccatcgacctgtcggccaaagtgctgatcctcgacgagcccaccgccagcctcgatacccaggaggtggagatgctgttcaccctgatgcgccagctcagggataacggcgtcagcctgatcttcgtcacccattttctcgaccaggtctatgcggtcagcgaccgcatcaccgtgctgcgtaacggcagcttcgtcggctgccgtgagacccgcgagctgccgcagattgagctggtgaaaatgatgctgggtcgcgaactggaccacaatgccctgcagcgggcgggccgtaccctgctgagcgataaaccggtagcggcgtttgaaggctacggtaaaaaaggaaccatcgccccgttcgacctgcaggtccgcccgggcgaaattgtaggcctcgccggcctgctgggttcaggacgcacggaaaccgccgaggtgatcttcggcattaaaacggcggacagcgggaaggcgtggatcaaaggcaaacctcagaccttgcgctccccgcatcaggcgtcctgcctcgggatcggcttctgtccggaggatcgcaaaaccgacggcattatcgccgctgcctcggtgcgggaaaatatcgttctcgccctgcaggcgcagcgcggctggctgaggccgatcccccgccgggagcagaatgagatcgccgagcgctttattcgccagctggggatccgtaccccgagcgccgagcagccgatcgagtttctctccggcggcaaccagcagaaggtgctgctctcccgctggctgctgaccaaaccgcagttcctgatcctcgatgagccgacccgcggcatcgacgtcggcgcccatgcggaaattattcgcctgattgaaaccctctgcgccgatggcctggcgctgctggttatctcttctgaactggaggagctggtgggttacgccgatcgggtcattatcctgcgcgatcgccgacaggtagcggagatcccgctcgccgagctctctgttccggcgatcatgaacgctattgcggcataaggagtaacccatgatgcctcgatctctttcgcaaaccggcccggagaagcgacgcttcacctggccgaagggcaccccgcagattattgccttgctgctggttctgctggtagacagcctggtggcgccccatttttatcaggtggtgctccaggatggccgcctgtttggcagcccgatcgatattctcaaccgcgccgcgccggtggcgctgctggcgattggcatgacgctggtgatcgccaccggcggcatcgacctgtcggtaggggcggtgatggcgattgccggcgcgacggccgcctcgatgaccgtcgccgggcacagcctgccggtggtgctgttggccgcgctggccgcgggcgcgctggccggattgtggaacggcatcctcgtggcggtccttaagatccagccctttgtggcgacgctgatcctgatggtggccgggcgcggggtggcgcagttgatcaccgccgggcagatcgtcacctttgattccccggccctggcatggctcggcagcggatcgtttctgctgtttccgacgccggtgatcgtcgccgccgctacgctgctgctgttctggctgtttacccgtaaaacggcgctgggcatgtttattgaggcggtagggatcaacatccgcgcggcgaaaaacgccggcgtcaatacccgcatcgtggtgatgctggcctatgtcctgagcggtgtctgcgcggcgatcgccgggatcatcgtggcggcggacatccgcggcgcggatgccaataacgccgggctatggcttgagctggacgccattctggcggtggtcatcggcggcgcctcgctgatgggcgggcgctttaacctgctgctctcggtggtgggggcgctgattatccagggaatgaacaccgggattttgctctccggcttcccgccggagctcaaccaggtggtgaaagcggtggtggtgctgtgcgtactgattgtccagtcgccgcgctttatcggtttactgaaaggggtacgcggccatgataaaacgtaatttaccattgatgatcacccttgcggtgtttgtgctgggctacctctactgcctgacccagttccccggttttgcctcaacgcgggtgatctgcaatatcctgacggataacgccttcctcgggatcatcgccgtgggcatgaccttcgtgatcctctccggcgggatcgatctgtcggtggggtcggtgatcgcctttaccggcgtcttcctcgccaaagcgattggcttttggggaatctcgccgctggtggcctttccgctggtgctggtgatgggctgcgccttcggcgcgtttatggggctgctgattgacgccctgaagatcccggcctttatcatcaccctcgccggcatgttcttcctgcgcggcgtgagctatctggtgtcagaggagtcgattccgattaaccacccagtgtacgacaccctgtccgggctggcatggaccattcccggcggcggtcgtctcagcgccatgggactgctgatgctgctggtggtggtggccggtatttttgtcgcccatcgcacccgctttggcaaccaggtgtatgccatcggcggcaacgccacgtcggcgaatctgatggggatttcgactcgcagcgccacgatccgtatctatatgctctccaccggactggcgacgctggccgggatcgtcttttccatttatacccaggcgggctatgcgctggcgggcgtcggcgtcgagctggatgcgattgcctcggtggtgatcggcggtacgctgctcagcggtggcgtcggtaccgtgctgggaacgctgttcggggtggcgatccaggggctgattcagacctacatcaacttcaacggcaccctcagctcatggtggacgaaaatcgccatcggcattttgctgtttatctttatcgcgctgcagcgtggtctgaccgtgctgtgggaaaatcggcaaaatacggcggtgacgcgggtgagcggggcggggagtcgctaagaaatgctcctcccgcaggcgcgggaggagcgggcagggcgcttaggcgtccgggaacgctttaataaagttctcgacgtcttctaccatgtggttgttgccgacgaagaaggagcgacgctgatgcaggctttccgggataatatccagaatacgctctttaccgtcgctggccttaccgcccgcctgttcggcgaggaaggccatcgggttgcattcatacagcaggcgcagcttgccttccgggtggctggcggtgctcggatagagatagatgccgcctttcagcaggttgcggtggaagtccgccaccagcgagccgatatagcgtgaggtataaggacgctgagtcgctttgtcctcttcctgacagtacttaatgtacttcttcacgccctgcgggaatttgatgtagttgccttcgttgatggagtaggtattgcccttctccgggaagcgcatgcgctcctggcatagacagaagacgccaagggacgggtcgtaggtgaaggcgtgaacgccgcagccggtggtatacaccagcatcgtcgacgatccgtagaccacatagcccgcggccacctgcttgttgcccggctgcaggaagtcttcttctgtcaccggcgtgccgacaggcgtcacgcgacggtagatagagaagatcgtaccgacagagacgttaacgtcgatgttagaggagccatccagagggtccatcagcaccacgtatttggcgtgttcacacccttcgaagacgacaatctcatcttcttcttcagaggcgatcccggcaacaatatcgcgtgctcgcagtgcggcttttaatttttcattagcgaacagatcgagtttttgctgaacctcgccctgaacgttttcagcaccgctggcacccaggatatcgaccagaccggccttgttgatatcgcggtggatgatcttggcgcccaactttattgctgacaacaaagcagtcagctcaccggtggcgtgggagaactcgtgctgcttttcaacaataaactcacctaacgttttcataactcgttccctgcatttttatgttgagtaaaacgaacgcaacaatcttaacaaagaatcaaaaaagtgcgcacaggtgaatcgcgccagcaaaatacagattcgcctgaaatgcatttcgccagggcccgggatatgggtaaaatgtgccccggataagaaaaggaaatgacgaatgcgcattcatattttaggaatctgtggcacgtttatgggggggctggccatgctggcgcgctccctcggtcatgaggtaacggggtcggatgctaacgtctatccgccgatgagcaccctgctggaaaaccaggggattgatttaattcaggactatgaccccagccagctggagccccggccggacctggtgatcatcggtaacgccatgactcgcggcaacccgtgcgttgaagcggtgctggaaaataatattccctatatgtccggcccgcagtggctgcacgacttcgtgctgcgcgatcgctgggtgctggccgtcgccgggacccacggcaaaaccaccactgccggcatggcgacctggatccttgaagcctgcggctataaaccggggttcgtgattggcggcgttccgggcaatttcgacgtctccgcgcgcctgggcgacagcccgttcttcgtcattgaagccgacgaatatgactgcgccttcttcgacaagcgctccaagtttgttcactactgcccgcggacgctgatcctcaacaaccttgagttcgaccacgcggacatctttgatgacctgaaggcgattcagaaacagttccaccatctggtgcgcatcgtgccgggcaaaggcaaaattatcctgccggagaacgacatcaacctgaagcaggtgatggcgatgggctgctggagcgagcaggagctggtgggcgagcagggccactggcaggcgaaaaaactgaacgccgacgcctcgcagtgggaagtcttactcgacggcgaaaaggtcggcgaagtgaagtgggcgctggtcggcgagcataatatgcataacggcctgatggcgattgccgcggcgcgtcacgtcggcgtgctgccggcggatgccgcgaacgcgctgggcagctttatcaacgcccgccgtcgcctggagctgcggggcgaagccaacggcgtcaccgtgtatgacgatttcgcccatcatccgacggcaatcctcgccacgctgcaggcgctgcgcggtaaagtaggcggtaccgcgcgcattctcgccgtgctggagccgcgctctaacaccatgaaaatgggcgtctgcaaggacgatctggcgccgtctctcggccgcgccgatgaagtgttcctcctgcagccgcagcatattccgtggcaggtggcggaagtggcggaagcctgcgtccagccggcccactggagcgccgacgtcgataccctggcggagatggtggtcaaaaccgcccacccgggcgaccatatcctggtgatgagcaacggcggcttcggcggtattcatcagaagctgctggataagctggcgcaaaaagcggccgcggctgaataagcgcgtacgcctccggtaactgccctccgcgtgagggcagttttattttagctaccaggaattgtgtgatgctgacctgcgaaagcgtacgttctaccgactcgccccatttcgccatgctggacgcgctttacgcgcgcgcctttccgtgtcacgagcagcgcgaaagcgaggccaaacgtcaggcgctgagccacccgcgctacgcgctggaagcatggttcgatgaaggcgtctttgtcggcctcagcggctgctggcagtttgccggctacggttatatcgaacatctggcgatcgacgacacgctgcgctcccgcggctatggtaaacagctgctggcgcagatcctgacgcgcgccccgctgaccattctggaaatcgatccgctaaccacggccatcgcccataaacggctgcgcttttatcagtcgatggggttccatgctaatccctgggcgcatcatcacccgagctatcatcagggcattgcggatcatgagctgctggtgctgagctacccgcagccgctcggtgagcggcagtatcagcagtttgcccgggatctcgggcacgaggtgatggggcgggagtagcccggctcggcgtaccgctccgggcattcgactggcggcgctgttactctttggcgatcggcgtctcgttctccgcgactttgttatcgccctgaatcttagcgattttctgctcaacggcggctacctgggcgctgtcgtgcagcagggtgtaggttagatcaaactgcgcgctggcgcccggctgcagctgcttcacgcgtttttgtttgcgttcaatggtgaccggataggcgtagctggtccccggttcgataccggtgacgtagccctgcttgacggtatcggtgtttttccacagcgtcaggaccggcagctgacgggtatcaaactgaatagaggcccctttatcgcccgctttgttgaccacggcggccagggtctggtgattttcatcggccaggggctgaatattaaataccatctcgtcaaaatctttagtcggtccctgataggtttgccaggtttttaacccgctcttcgcgtaatcattgaacgggctgatgctggagatcggggcgaggaaacgcgcgccttcttcgaggatcggggtgccgaagttgctgtggtagatgatctgataatcatgcggatagtcggcatggttggttaagacatcatgcaggctgaagctgttgctgcccgggacgtagcgcagttcggtcagggtctgcagatcggcttttttaaaggtgctctctttcaccagcccgcggatgcggatttcatacggcgcgctgtcggccacctccacctccaccagagaggccggcgtgttgcccgccttgccgtgtagggtataaatttgcccgtccgcggtcaccggatggccggtccattcatagccgcagcggaccatcatctcgttgaatccttccagccagccgaggccattgcggctttccaggttgataaacgccgggttgacgacctctttaaccggcgaatcccagcccatccggctgccgaaaccctcaatacgcagtaagttcatgccgcgtgtcgggctcaaggtaatggtcaggccgtctttactgtgaatggtaaggattttgctgccttcctgcttaccgccgtgcaggactttctgctcaatgctgaacgcatgatctttcaccttcagctgatcgctgttgatctgccagtttcctttatctatcccctcttcagcgttcgtcagcacccatgtttttgccacggccgagccggaaaccagcagggcgatcgtcgtcagaaccaatgtctttttcatttttattccctttttgctgaatcgattgtgtcattgacgtgtgaaatctaccggcatgggggtgattaaaatgtgaagcgcctcacctggtgagaaaatggccgatttgctaaggctaaatgggatggaagtcgtattattttgctaagtaatacgtatttatcaccaggatatgtgatctatattgttttcagatttaacgattcagcttgataagtcaggctataaacaaacgcatcgttgtgcggatgaggggactcaggcgatgcgacgggaatccccctgctggcgcaagccttagagctggggtgacggtaggccggataaggcgtagccgccatccggcataacgacgggaacggaggctggtacagcttgcccggcggcgctgcgcttgcgcgggcctacggtgttggataaccgtttgatataccgggctccgtaggccggataaggcgtagccgccatccggcacaatgacgggaacggagtctggtacagcttgcccggcggcgctgcgcttgcgcgggcctacggtgttgagtaaccgtttgatatagggaaccgtagcccggataaggcgcagcgcgccgccatccgggagactattgcgggcaaaaacagggggacttagccttcgttttccgccagttcacgcagatactggaagatcaggcgcgccgatttcggcggcttgttgccttctttctctttcttcgcattgcggatcagcgaacgcagctgctgacggtcagcatctggccacaggttcagcacttcagcgacggcgtcatccccgtcgtcaatcagtcgatcgcggatctgctccagcttgtggaacagcgcaacctgctggttgtgacggtttttcagcttgtccagcgcctgacgaatcggatcgacatcgcggttgcgcagcatcttgccgataagctgcagctggcggcggcgaccctcttttttgattcgctgggcgagttcgatggcgtcgcgcaggtcggtatccagcggaattttatccagcgcgtttttccccaggtcaacgagttccgcgccaagacgcttcagttcttccgcgtcgcgcttaatttcactcttactgacccagatgatttcatcatcttcatcttcaacgtcatcaccgggcacgtcgtcgagccagtcttcgggctgctttgtcatctcaggctccttaaaaaaagaggctaatgttaccagttaaggcgcgcactgaaaaacggttctctgttagacttcagttaactccttcttacattatggcattagcaatgaaagtcatctctcaagttgcacagcagcgtaagacgctggaagaagccgttaccacggcactggaactggcggcaggtaaatctgatggtgcggaagtttccgtcagcaaaaccacgggcatcggcgtcagcacccgctatggcgaagtggagaatgtagaattcaacagcgatggggcattaggcatcacggtttaccatcagaaccgcaagggcagtgcctcctccaccgatcttagcccggacgctatcgcccgcaccgtgcaggcggcgctggatatcgctcgctatacctccccggacccgtttgccggcgtagccgataaagatctgctggcctttgacgccccggatctggacctgttccacccggcggaggtctccccggacgacgccatcgaactggccgcccgcgcggagcaagcggccctgaaggccgataaacgcatcaccaacaccgaaggcggcagctttaacagccactacggcatcaaagtgttcggtaacagtcacggcatgctgcaaagttactgctcgactcgccactccctctccagctgcgtcattgcggaagatgacggcgatatggagcgcgactacgcctacaccattggccgggcaatcgaggatctgcagtccccggaatgggtcggggaagagtgcgcccgccgcaccctgtcgcgcctggcgccgcgtaagctgtcgaccatgaaggcgccggtcattttcgccaacgaagtggcgaccgggttgtttggccacctggtcggagcgattgccggcggcgcggtctaccgtaaatcgaccttcctgctcgattcgctgggcaaacaaattttgccggagtggctgaccattgaagagcatccgcacctgctgaaagggctggcctccacgccgttcgacagcgaaggcgtgcgcaccgaacgtcgcgatatcgtcaaagatggcgtgctgacccagtggctgctgaccaattactcagcgcgcaagctggggatgaaaagcaccggccacgccgggggcatccacaactggcgcattaacggccgcggcctgagttttgcaaagatgcttaaagagatgggcaccggtcttgtggttaccgaactgatggggcagggtgtcagtggcgtcaccggcgactactcacgcggcgcatccggcttctgggtagaaaacggcgaaattcaatatcctgtcagtgagatcaccattgcaggaaatctgaaagaaatgtggcgtaatatcgtgaccattggcgatgatattgaaacgcgcagcaacattcagtgcggttctgtgctgctgccggagatgaaaatcgccgggcaataacacctgtttgcttaaataataaaaaggaagtgagcaatgcgtaaaaaactgttagcgatgctggctgtctctgcttttgcgctcggttcagcgtcggccttcgccgacctgggcgaagacatggacactctggcagaaaacctgcaagtggtacagaagacctccgacgccggcgagctgaaagcggcgctgaataagatgcgtaccgccgcggtcgatgctcagaaagagaccccgccgaagctggaaggcaaagcggccgacagcgctgagatgaaagattaccgtcacggtctggatattctgatcggccagatcgacggtgcgctgaagctggcgaacgaaggcaaggtgaaagaggcgcaggccgccgcggaggagtttaaaaccacccgcaacacctatcataagaagtaccgctaaccgttcttttcgggaggcatcagccgatgcctcccacctgaaagcctaccgatatcacatttttccactctctttttccggcctttccgctgccgcgggcgccttgtccatgctcattgttgtgatacatctcacgccatagccgtcgtttttaccttttccctgtgaatatgtggagtcgatcacctaagccttctccctttccacttcgaagtggaaaacaactcgctacaaactcctgacccccggcgctaccttgatttccagagacatcagcggggtaacacaagtgaataacggagcggtaataaacgacgtaggggagcaggcggcgcagaccgaacgcctggctgacaagatgttacagcaggttttcgccctgttaagccgtcacgacatcgtccctaacgacgttcaggagcaaatgctgacttcccacgtgcgggccatggcccaccggtcaatcagcggcgaaccgctaccggaagtggatgccagtctgttcgaagaaatttctgaagattcaatgatgctggcccgcgaagtggtcgcacagttcggcaacctgcctgatgaagaggcctggctgctctccgtccacttcgaagtcgcgaaagataacctgtaaggagcaaaacatggaacaaatcactgtaatcattggcgaccgtctgggtaaaggccaaaaagtcgccgcaggcgctgaaaaagcgggcgcacgtgctgtggtcgtccctggcgttgcggccgacatgaagcttggcgacataatgaaagcggaaaacgccaccttcggcatctccttctgcggcagcggcggcgctggcgccatcaccgcccagaccaaatacggctacaaagcaaaatatggcatgcgctctattgatgagggcgtcaccgctatcaacgaaggctgcaacgtgctgggcttcggctttatggataaagaagagctgggcgagcggctggtcgaagcctggaaaaagaaatacggcgcataagtatgaaagagcaattcaccaccacggtgagggttgccggcaaaggcgaaagcaaatcacgggccttcgccgatgccctgaaccatgtgcaggctgcggtgatgaaatcatcctcgcgcatcctactgcgtattgagccacaggacgtgacggttgttcatgcgcgcgaagcggtacgaaaagaggcgtttctgttcttctttttgcgccgtgaacgacggacctacagcgtggagctggacgtcaccgtcaacgtgaccgccatcgatctcgataaagtggatttcgtcacgcaaacctgattgttagcaaaaggtctgactatgttcctgataattttaataaaatcgcttatcatcggcggcctggtcggcgtcggcgtgggcgccggagcggcacgcatgtttcatgcccccaccacgcaggggatgggggcgtttcgaaccctgggcgagctgaattcctgtgagggcgatccggcctcccacttctcctttggccttggcttcttctttaacgcctgggcctcttccgttgcagcaggctccttcacccaggatgttgaccaccgcattatccccaactggggcgcggcggcgctgatgctgaaaaatcgtaacgtcggcgaaacgctgcacgatccgaaaaaaatggccatctcctgcggcatcatcggcatgatcgtcgtcgccttcctcaacctgaccgcctcgtccgtaccggaagcgctgcaggtgaccgccgttaaggtactggtgccggcggcaaacctgctggtgaacaccgtgatgccggtgatcttctggctggcggcgatcgatgccggtaaaaaatcaggcttctgggcgacgattttcggcggcgccgcgcagctgataatgggtaacgccgtaccgggtctggtgctggggatcctgatcggtaaaggcgtcgaagagagcggctggaaccgggtgactaaagtgatgatggtggccatcgtcgcgctgtttgtcctcagcggcttcttccgcggcttcgacatgaagatgatcgaatccttccatctgaccgtgccgaactggctggacatgatccacaactcactcagcggcaagtaacgggagccggataatggaacagaataaaggtttttggtatgccgactggtcgttcccgatctttgttggcctgctctcctccggcgtcttcgccgggacccacatgtactacctgtacggcatcggcgcctttaacgaagtggccttcgtggcgatgctgaagtcggggattgataccggcgtttacggcgcggtggcggcgtttggcgccagcttcctgttcgcccgcatcatcgaagggtcgctggtagggatcctcgatatcggcggcgcgatacagaccggtatcggtcttggcgtgccggcgctgctgctcggcgcgggctttgtcttcccggtggcgaacttcgccgcgtcgctggtcaccggcctggtcctcggcctggcggtgggctacatcatcattctggcgcgtaagttcaccatcaaccagagcgattccacctacggcgccgacgtgatgatgggggccggtaacgcctccggccgcttcctcggtcccttgatcatcctcagcgcaatgaccgcctcgattcctatcgggattggctcactggttggcgcactgctgttctacatctggcagaaaccgatcaccggcggcgccatcctcggggcgatgatcctcggttccatcttcccggtggcgattagctaagcgcccgatggcgctgcgcttatcgggcctacaagccagcgcggtttgtaggccggataaggcggtacgccgccatccgtacactcttttcatcaggagatagctatgtttgatttactcctgcgccgcgcgcgcctcgtcgacgataccctgactgatatcgccattcaggacgggaaaatcgcggcgctgggcgagattagcgcgccctcccgtaaaaccattgagatgaacggcaaggcttacgtcagcgctggctggattgactctcacgttcactgctacccgaattcaccgatttatcacgatgagccggatagcgtcggcatcgccaccggcgtcaccaccgtgatcgatgccggcagcaccggcgccgacgacgtcgatgacttctatcaactgacccgtaaagcggcgacggaagtttatgcgctgctcaacatctcccgcgtcgggctgattgcgcagaatgagctggccaatatggccaatatcgacgccgccgcggtgaagcaggcggtgcagcgtcatcccgactttatcgtcggcctgaaggcgcggatgagcagcagcgtcgttggcgaaaacggcattacgccgctggcgcgcgccaaggccattcagcaggaaaacgacgatctgccgctgatggtgcacatcggcaataacccgccgaacctcgatgaaatcgccgatctgctgagcagcggcgacatcattacccactgctataacggcaagccgaaccgcattctgaatcctgccggcgagctgcgtagctctattactcgcgctctgcagcgcggcgtgcgtctcgatgtcggccatggcaccgccagcttcagctttgaggtggcgcggcgggcgattgcgctgggcattctgccgcacaccattagctccgatatttactgccgcaaccggatcgacggcccggtgcgctcgctggcgctggtgatgtcgaaattcctcgccatcggcatgacgctgccgcaggtgattgactgcgtgaccgtcagcgccgccgaagggctgcgcctgtcgcgtaaagggcggctggaagtgggcttcgacgccgatttaacgctatttcgcctggagcaccggcccacgctgctggtggatgccgaaaaagagagcctgcaggctgacaacattctggtgccgctggccgcgatccgcgcgggcaaaggctatctgaccgaacaagggagcgcggaacatgccttcgatttttgagaaataccatttaaaacaggtgattaatacttctggccgcatgacggcgctgggcgtttccacaccgcgcccggaagtggttgaagccgcgatggccggtatgaaccagtactttgaaatgaaagacctggtgaataaaaccggcgagtacatcgccaaactgttggatgtggaaggggcgaccgtggtctcctgcgcatcggcggggattgcccagtcggtagcggcggtgctggtgaaagacagcgactggctgctggagaacctgcacgttacgccgattgaaaataacgaaatcgtgttgccgaagggccacaacgtcaacttcggcgcgccggttggcaccatggtggcgctgggcggcggtaagctggtggaagcgggctacgccaacgaatgttctgcccaacagctggcggcggcgatcactccgcgcaccgcggcgattctgtacatcaaatcccaccactgcgtgcagaaaagcatgctcaacgtggcgcaggccgcggaagtggcgcgccagcataacgtaccgctgatcgtcgatgcggcggcggaagaagatctgcagtgctactaccgcatgggcgccgacctggttatctacagcggcgcgaaagcgattgaagggccgaccagcgggctggtgatcggcaaaacgcagtacgtcgagtgggttaaacgccagtcgatggggattggccgggcgatgaaagtgggtaaagagggcattctcggcctgacctgcgccattgaacactacctgacggcgagcaaagagagcggtcagcagatggtggcgaagatgacgccgtttatcgaacagctcaacacgcttaacggcgtgaccgcccgggtggtgtgggatagcgcgggtcgcgatatcgcccgcgccgaaatcaaatttgatgaagcgaccaccggtgtgaagaccggcgatctggttaacgcgctgaagcagggcgaatacgccatctacttccgcggctataaagcgaatgaaggcattatcgaagccgatgtccgcagcgtaaacgcccagcagctggaggtggtcgctcgccgcatcgcagaagttctgaataaggagaaacaagcatgaaactgaccccaaacttttaccgtgaccgcgtgtgcctgaacgtcctggcgggcagcaaagacaacgcccgtgaaatttacgacgcggcggaaggtcacgtcctggtcggcgtgctctccaaaaactatccggacgtcgccagcgcggtggtcgatatgcgcgactacgcgaagctgatcgataatgcgctctccgtcgggctgggggcaggcgatccaaaccagtcggcgatggtgagcgagatttctcgtcaggtgcagccgcagcacgtcaaccaggtcttcaccggcgtggctaccagccgcgcgctgctcgggcagaacgagacggtggtcaacggcctggtctctcccaccggtacgccgggaatggttaagatctccaccggcccgctgagcagcggcgcggcggatggcattgtgccgctggaaaccgccatcgcgctgctgaaagacatgggcggcagctccatcaaatacttcccgatgggcggcctgaagcaccgcgccgagtttgaagccgtcgccaaagcctgcgccgcgcacgatttctggctcgagccgaccggcggtatcgatctggaaaactacagcgagatcctgaaaatcgccctcgatgccggggtaagcaaaatcatcccgcatatttacagctcgattatcgataaagccagcggtaacacccgcccggccgatgtgcgccagctgctggagatgaccaaacagttagtgaagtagtgcccttgtccctcaccctcaaagggtgaggggcagcttatcccactgaaccatcaaggagttgctatgcctgtcgctcgtcatctgcttgtcgcttcactgtccctgtttgccgccgccgcgggcgccgcgcaaacccactatgcctgggtaggcacctataaccccaatggcgaaggtctgtatcgctttaccgtcgatgccaaaaccggcgccctgcgcgataagacgctggtgagctcgttgccgaacgtcgcgcagttaaccgtgtcgcgcgatggcaaaacgctgtatgccgccagtgaagtcgaaaaaggcgtggtgcaggcgtggcgcattgaaaagaacggcgagctgaccgcgctcaaccaggtcgcctccggcggcgccgggccggtgtatctctccctgacgccggacggtaagcatctgctggtggctaactatgtcagcggcagtatcgccgtgctaccggtgcaagaagatggtagcctggctgaggcggtggacaggcatcaggatgaaggcccggcaggcgccgaacgcccggcggcggccgtcgagggcagcttcgccatcagcgatcacaacggcccgcatgcccatatgatcgccgccgatcccagcgggaaatacgtttactctaccgatctggggctggatcggatctatcagtatcggctggatagcgccagcggcaagctaacgccgaacgatccgccgtttatcgccgcctcgtcgccgggagccggcccgcgccacttcgtctttacgccacagggcgacggcctgtggctgattaatgaggaagcctcgacgctgaccttctatcatctggataagcaaagcggcctgctgcgtgaaggcaaaactgtctccgcgctgccggaagggtataaaggcaccagctttgccgccggacttgtgttgagcaacgatggcaaacagctatacgtcgccaaccgcctgcataacagcattgcccacttcacggtgctggccgacggcagcctgagtcaccaggaagatatctggacgcgtggcgattatccccgcaccctgacgctggataatcaggggcagtggctgtacgtcatgaaccagcgtagcgataatattacccgcttcagcgtggcgccgaaggatggcaaattaacctttgcctccgactatacgccggtcggtagcccatcgcagatggtgatatccgcccaaccctgagccgtaattacaaggaactgacatgcgatttcccaaccaacgcttagcgcaactcttcaccctgctgcgaaatgaaacgctgccgcaggatgagctggcgcaacgcctgtcggtttccacccgtaccgtgcgcgccgatattaccgccctgaatacgctgctggcgcaatatggcgcgcagtttatccttaaccgcggcagcggttatcagctgaagatagataatccgacgagtttccaggcgctggaggagaccgcgccgaaggcgcagcacgtgccgcgtaccgcccaggatcgcatcacgtttctgctggtgcgtttcctgacctcggcgttctctatcaagctggaagatctggcggatgagtggttcgtcagccgcgccacgctgcaaaatgacatggttgaggtgcgcgagcgcttccagcgctatcagctgactcttgaaacccgcccgcgccacggtatgaagctgttcggcagcgaggtgtcaattcgcgcctgcctgaccgacctgctgtgggagctgacccagcaaggcgatatcgcgccgccgatcggcgccgaggcctttgcggcggaggtgccagcgctgctggagccggtgctgcaggagacgctcacgcggcatcatattcgcctcaccgacgccggcgagcgctttgtctgcctgtatggcgcggtggtggtgcgccgcgtcagcgaaggctacccgctggccgatttcagcgctgaagatgtggcgcagaacgtccgcgacgccgcgcgcgagctgacgggcgagctgcagcggctggccgggaaacctttatcgcccgccgaagaagagtggctatgcgtgcatatcgcggcccgtcaggtgcaggatgtcgatccggaaactatcagcgccgacgatgatgaagcgcaggtcaattacatcctgcgctacatcaacagccagtataattacaacctgctggacgacgcccagctgcatgccgatctgctgacccacattaaaaccatgatcacccgggtgcgctaccagatcatgatccccaatccgctgctggataacatcaaacagcactacccgatggcctgggatatgaccctggccgcggtctccagctgggggaaatatactccgtacaccatcagcgaaaacgaaatcggctttctggtactgcatatcggcgttgggctggagcgccactacaacatcggctaccagcgtcagccgcaggtgctgctggtgtgcgataccagcaatgcgatggtacggatgatcgaggcgatcctgcagcgcaaatatccgcagctggagatcgccgctaccatctcccagcgcgagtacgaacagcgggacgcgatcgaggcggatttcgttatctcaacggtgcggatcggcgaaaaagacaagccggtggtgaccatcgcgccgttccccaccgactatcagctggatcaaatcggcaagctggtgctggtggaccgtacccgtccgtggatgctgaataagtacttcgatgccgcccacttccgggtggtcgataagccgatggatcagcaaacgctgttcgccgagctgtgccagcagctgctggaggaaggctttgtcgatgcggagtttcatgcttcggtggtggaacgtgaagcgatcgtcagcaccatgctgggggatggcattgcgctgccgcactccctggggctgctggcgaaaaagacggtggtttataccgttatcgtcccgcagggcatcgcctggggcgacgaaaccgcccatctcattttcctgctcgctatcagcaaacgcgagtatgaagaggcgatggcgatctacgatattttcgtgactttcctgcgcgagcgcgccatgagtcgcctcgccgcgacccgcagcttcgatgagtttaaaacggtggcgatggagtgcgtcagccggttttgagaggcgttttccagattcgagtgtaattcaaatgtaatgctatactgcattacaaaattcccttttctggaggcataatggccacgctcaatgttcgactggacgataaactcaaaaaagaggcttatgccgtgctggagaaactcgatatgacaccaacggaggcggtacgcctgctgtttcaatacattgcggaaaatggccgcatgccggtgaaaagtatgaccatcagtgatggcgaagcggcgttattacgcaccgttcgcgaacggctggaaaacccacggccgggggttaaggtgagtctggatgacctatgaactggagtttgatccacgagcctggcgcgaatggcagaagcctggcgagacggtcaaaaaacagttcaaaaataagctccagcagattgtgcagaatccgcgaattgagtcgaccaggctgagcgatttaccggattgctacaaaatcaagcttaaggcgtcaggttatcggttggtgtatcaagtacgagatagtgtggtggtggtttacgttattgccattggcaaaagagagaaagcggccgtttatcatcaggcgaataaacggctctaaacgctatcgcaaatgatgtacgacctggttgctgctgccgcgccagataagcgccggatctttcaaatcctgcacaaacttaccgtcaaccagcacgttaatcaggttcacgacttccatctgctcggcgttcagttcgtcaatcttatagcccgtccagacccagatatctttgccggggcattcggcgcgtacgcgctgaaccagctttaaaatatccgcgatgttctgcggatgcagcggatcgccgccggagagcgaaagcccctggcgtttgatgcgggtgtcgttgaggtcggcgatgatacggtcggccatctcagcggtaaacggcataccggagttcacccgccaggtgcttttgttgtagcagccggggcactcgtggacgcagccggagacaaacagggtgcagcgggtgccggggccgttgacgatgtcgacggggtagtactggtgataattcattttcgcttctcaattaacgccatagccgcgttggctgcgctcgctcaccccggtcacgtactgaatgtacgctcccggggattccctcgtttgccgccttgctctgacgctaattgctttgcgaaaacggaggtgctgtgcatatgtaaagggaacggctcccggcgtcgctgcgctcgcccgggctacgaaaagccgcatacgcggttgtagcccggataaggcgctttgcgccgcgatccgggaacggctccttagtggccaaacggctacggggccggtcccttctccccgttggggagagggtgaggggctaaaccagctggaattaaccaatctgcccattgcccaggtgcttcacgcggcgcttcacttcttcctgcttgccggcgttgaacggccgcgcgtccgggctgccgagataaccgcacacccggcgggtaacggaaacgcgggcggcgtcgtggttaccgcatttcgggcaggtaaagcccttgctggtgcactcgaactcgccggtaaaaccgcactcgtagcactcatcgatcggcgtattggtcccgtagtacggcacgtgctgatagctgtaatcccacacgtcttccagcgccttgaggttatgctggatattcgggtactcgccgtagcaaatgaaccccccattggccagcggcgggtacggcgcttcgaaatcgatcttatcgtacgggttgaccttcttctccacgtcgaggtggaagctgttggtgtagtaacctttgtcggttaccccttccaccacgccaaactcggcggtgtcgagacggcagaagcgatcgcacaggttttcgctcggcgtgctgtacaggctaaagccgtagccggtttcttccttccacaaatcgacggcgtcgcgcaggcgctggacgatggctacgcctttctcacgcagcgcctcgctgtcgtacatatgctggttgccgtacagcgcattgatggtttcatggataccgatatagcccagagaaatggatgctcggccgtttttgaagatctcggagacgtcgtcgtcggctttcagccgcacgccgcaggcgccttccatatacaggatcggcgccacgcgagccttcactccttccaggcgggcgatacgggtcatcagcgctttgcgcgccagctgcaggcgctcgtccagcagcgcccagaaggcggcttcatcgcctttcgcttccagggcgatgcgcggcaggttgagactgatcacgccgaggttattgcgtccatcatgcacctgctcgccgttctcgttttcccataccccgaggaagctgcggcagcccatcggcgttttaaacgacccggtgactttcaccacctgatcgtagttgaggatatccgggtacatgcgcttgctggcgcactccagcgccagctgtttgatgtcgtagttcgggtcgccgaacttatggttcaggccgtcgcggatcgcgaacaccagtttcgggaacaccgcggttttgcgatttttaccgaggccggcaatgcggttgcgcagaatcgactgctggatcagccgcgattcccagctggtgccaaggccgaacccgaaggtgacgaacggcgtctggccgttggcggtatgcagtgtgttgacctcatactccagcgactggaaggcgtcgtagcactctttttcggtacgggcgcgggcatagccttcggcatccgggatctgccactcttcggcgattttgcgatgctttttgaagctttcgctgacgaacggcgccagcacttcatcgatgcggttgatggtggtgccgccgtaaatatggctggcgacctgggcgatgatctgcgccgtcaccgcggtggcggtagagatagacttcggcggctcgatctccgcgttgcccatcttaaagccctgggtcagcatgcctttcaggtcgatcagcatgcagttgaacatcgggaagaagggcgagtaatcgaggtcatgatagtggatcatgccgcgttcgtgagccatcaccacatcgtggggcagcaggtgctgccgggcgtagtgcttggcgacgatcccggccagcaggtcgcgctgggtcgggatgactttactgtccttgttggcgttttcgttgagcagcgcggagttggtctgctcgacgaggccgcggatctcctgattgagacggccgcgcttctcacgctggctatcgcggtcatggcgatactcaatgtaggcgcgcgccagctgcttataggggccggacatcagctggttttccaccgcggtctggatctcgttgatgtcgacctgggcgcggccctgcatttgttggctaacgacttctgcgacggtggcgcaatagtctgcgtcatcgactcccgctgctttagctgcacgcagaattgcttcctgaatgcgctctgagttgaacggcactttacagccatcacgtttcatcacatgcggtgtcatgatcactccatatatagaacaggttatccacagaggcggaggttatcccgaaggcgctgcacgctacggctcgtgctgtttaccttcggatccggcccgttttatccacatctcatcaccgccagacatcgacaagatatggtgacataatagacgattaatacaatatgttgggccgaggcgcattttaagttctatatgtagtgatttgcatcaaagatgtttgcgattttattgacccagaacaaggtaaaaaggtgagagtacggatgatgggcgctggcgataaatgtaaatttaggcgcttaaaatataatcaaaaatcgagcccgttcaggcatgaaacgggcaaatattcaggcaatcaacgtatcgttaagcagatcgaccagcagtagcagggcatagcgagcctgctgcgggtcagcgggcagcggcaggatggcgctggccatatcgccaagggcgtgctgttccggcgtcagagcaataatggtcactccctgcgtacgcgcctgcaaagtggcgctttgcaacacagggttggcctcggcagtggccagcaccagcagcagatgatcgtcattgagggtgctggcggtcagccgcatcagcgccgcatcctggcagagattaatcgcgatgccggagggcagtagctgatgctggagcagcgcggccagcgtcacgtcctgggcgccaagggcgaagcagtgtaccgcacgggcgctcagcaggcgcgatttacacttttccaccgccgcttccgcggtatggccgagctgacgagttagggtaacgccaaggctgctaagtttgtcgcgccaggcgacgggcagggcggcgctgtccggcgtaagccagctggcgcgccgttcgctggcctgcgccagctgtttacgcagatcacgaatatcatcgcagcccaccgagcgggcgaagcgggtaatggtggcagggctgacccccgcgctggctgccagctcgtcaatagaggcgctggcggtaaagcttagattttgtagaataaaggtggcgacgcgcgactcctgggcactaaagcggcgcattccttcctgcagctgacctacgatatccatcctcatgttccctttggcaaaacccgtatttgaaaatatttttcaattatcgactgtctctctttatagcactcacgccgcatatttcctatggtcagagcagtaaagggtgacaccctggcgataaaaatgcgcaaaaattgagcctcgatcacatcggtgaaaattattttcatatagccttcactatcacacaatattaacaatatagtcgtccaggccctgagggctgaagcgataacacgtaaaggggaagcgcaatgccacgaatcgtactctgttgtgccgcaggcatgtcgaccagcatgctggtgaacaaaatgaaagcagaagcccagcagcgtgcgctggcgctggaaatctatgcggtggcggtggcggaatttgaacgcgaactgccgaacgccgacgtcatcctgctcgggccgcaggttaaatatgaagccggacggctaaccgcgctggccgcgccccagggcaaggcggtggcggtgatcgatatggctgactacggcatgatgcgcggcgctgcggtgttggataaagcgctagccctgctcgaacactaattttctcatcccgtttttcatcatcatcacgtgcggtcctggcgatcgcgcgcggcgctctgtatgccgaaaatccgaaaagaggacactatgcaagcactgaaaattgccgttatcggcggcggcagcagctacacgccggagcttattgaagggattatcgttcgttacgagcagcttccggttacagagctggcgctggtagatgtcgaatccggccgggaaaaggtggagatcatcgccgcgctgacccggcggatgctgaaacataaagggctggagcaggtggcggtcagcgtccactttacgctcgatgaggccatccgcggcgccagctttgtgctgacccaactgcgggtcggacagctggcggcgcgcgccgccgatgagcggctgggtctcaagtaccacctgctgggccaggagaccaccggcgtcggcggttttgccaaggcgctgcggacgatcccggtgatccttgaggtggcgcgcaaagtggaacagctggcgccggaagcgttcattctcaactttactaatccggcggggatcgtcaccgaggcggtcagccgctacagcaaggcgaagatcatcggcctgtgcaacgtgccgatcaacatgcagcacatgatcgtcgggatgctgggcgcccaggagtccgaagtaaaactgcgctttgccgggctcaaccatatggtttgggtgcataaggtgctacaggggcgcgaggatgtcaccggcaaggtgatcgacatgctgtgcgacggtaaggcgctgtcgatgaacaacattaaagagctgccgtggccggcggaattcctgcgcgcgctgaaggcgattccgtgcccctatcatcgctatttttggctgacgccggcgatgctggcggaagagatcgccgcggcgaaaaccaagggcacccgcgccgaacaggtgatgaaagtcgagcaggagctgtttgcgctgtacgccgacccgcagctggaagaaaaaccggagcaactgagctttcgcggcggcgcctactactcggaggtggccgtcgagcttatcaacgcgatctacaacaacctgggcgcggagatggtggtgaatacccgcaacaacggcgcgattcatggcctggatgatgatgcggtggtggaaaccaacagcattattgatgcgcaaggggcgcggccgctggcgttcggcccgctgccgccggcgatgaacggcctgacccagcaggtgaaagccttcgagcggttgacgattgaagccgcggtacacggctgtcgcgaaagcgcactgctggcgctggtgaccaacccgctggtcggtaacgtcaccgatacccaggcgctgctggatgaagtattaaccatcaaccgtcaatggctgacgcaatttaactgaccgctatttcccctcgggagcacaccatgtcgaatacaagctggattgaacgttacgtcatgccggcggcgctgagaatcgccgggcaaaagcacgtcctgtcggtgcgcgacggcatcattctcaatatgccgtttatgttgattggctcattcttcctgattttcgcctacctgccgatccccggctatgccgacatgatgagcggcctgtttggcgaggtctggcgcgataaaatgctgtacccggtgaaagcgacctacgacattatggcgctgatttccagcttcggcatcgcctaccggctggcggagaagtatcgcactctcgatccgctgagcgctggggcgatgtcgctggtggccttcatgatgacgatcccgcagaacacgctgtttacgccggtacacggcgcggcggaggtgattaaaggggtgatcccggtgagcatggtcggcagccaggggctgtttgtcgccattgtcatttcgctgctgtcgacggagatttatcgtttggtcgccagccgcaatctcgttatccgcatgccggacggcgtgccgccggcagtggcgaaatcattccttgccctgatccccggcttctgcgtgctggcggtggtgctggcgctgcgcctggcggtcgaggcctcgccgttcggcgatatcaacagtatgatcgccaccctgattggtattccgatgcaccacgtcggcggtacgctgccgggcatgattatttcagtcattttgattggtattttgtggaccctgggcctgcacggcgacgcgatcgtactggtgtttatccagccggtatggctgtcgaatatgtccgagaacctgacggccttccagaacggtcagccgatcccgcatatcattactcagcagttttacgatctgtggattgcccccgggggtaccggcgcgctgctggggctggtgatttttatgttgctgcgtagccgtagccagcagatgaagcagctggggaaaattgccgcgcccggggcattgtttaacatcagcgagccgatggtgtttggcatcccgctggtgatgaacccgtactttttcctgccgtttattttaacgccggtgctgctggtgatcgtgtcctataccgcgatggcgaccgggctggtggcgccgcccgccggaatcgcgctgccgttcaccacgccgatcttcatcagcggctatctggcgaccggagggcatatctccggcacggtgctgcaggtggtgaatttagcgatttcgctggtggtctactatccgttcttccgcgcctgggatcggctaaaggcaaaagaagagcacgcctcggcgcaaccccaagcgagcgctgcgattgctgatgccgaccgcgcataacttccagcctgacgaatcgtagccccggtgagcgttgcgccaccggggaaaagcgttatccctgcagccaccatatcgcttcgaacggccgcagcgtcagcccggtcgggcgcggggtggtctcggcatagttgctgatgatcatcttccactcgcccggggcctcagcgggctgccaggcctgcagctcgcggctcaggttagcggcgactaccagcgtttgcccctgccactgacgacgatagcaccacagcgacggatgctccggcagcagatcctcgtaatcgccccaggtcagtagcggcagggttttacgcagcgtaatcagctgctgataggcataaaacaccgaatcggggtccgccagcgccgcctcgacgttgatctcctggtaattatcgccaaggccgatccacggctcaccgtcgctgaagccaccgttctcgccggcgtgccacggcatcggcgtgcggctgttgtcgcgcgacttgctggcgaggatcgccagcagttcgtccgggctttgcccctgcgccgcacgttcgataaacatattatggctttcgacgtcacggtaatcgctgatgctgctgaagtgcggattggtcatgccgatctcttcgccctggtagatatagggcgtgccctgcatgccgtgcagcaccatcgccagcatcttcgccgccgtcacccggtactcgccttcgtcgccaaagcgcgacacgatgcgcggctgatcgtggttacaccagaacagcgcgttccacgcccgattgtgcattccccgctgccagtggcggaacagcgccttcagcgccacatagtccgggcgggcgagggtccatttctctccgccgggataatcgacttttaaatggtggaagttaaaggtcatcgacagctcgcggccgtccagcgcggcgtactgctggcagtgctccagcgaggtggaggacatctcgccgacggtcatcaggttacgcggggtgaagacatcgcggctcatctcctgcaggaactcatgcacccgcgggccgtcggtatagaagcggcggccatctccgtccagatcgcagggaaaggtctggtcttttgagatcaggttgaccacgtcgaggcgcagaccgtcgacgccgcggtcagcccagaattcgcagacctttttcagctcggcgcgcaccgccggattctcccagttgagatccgcctgctcaatggcgaacaggtgcagataatactgcccgctgtcggcgtgccactgccaggcgttaccgccaaatttggagcgccagttgttcggcagggcgtccggttcgccatcgcgccagatatagaactggcggtagggactctccttattcagcgactgacggaaccattcatgttcggtcgacgtgtggttcagcaccatatccagcacgatgcggatgccgcgggccttcgcctccgtcaccagggcgtcaaagtcggccatcgtgccgtaggaggggtcgatggcggtgtagttcgccacgtcgtagccgttatctatctgcggtgagacgtagaacggcgtcagccagatggcgtcgaccccaagcttttgcagatagtcgaggcgggcggtgacgccgcgcaggtcgccggtaccgctgccggtggtatcctgaaaactcttcggatagatttgataaataacgccgttttgccaccagtgggggagatgattcatagtactttcctgctgcaacgaggggcgccaaaggcgccccgaaagaagaagttagacaatctgcaaggtgccctgacggtacttgcgctgatacaccacgctggtgaggataatcggcaccaccaccgcgatagccatcgccatggcgtacacctgccagtaggtaggctggatggagaggatccccggcaggccgccgacgccgatgccgttcgccagcacgccgttcaggccgcacagcaggccggcgaggccagagccaatcattgcgcacagcatcgggaagcggtatttcaggttgataccgtacatcgctggctcggtgaccccgagataggcggagatcgccgccggtaccgagatttcacgttcattctgcttgcggctggcgatgatgatgccgaccaccgccgacgcctgggcaatattcgacagcgcaatcagcggccacaccggggtaccgcccatgctctggatcatctgcatatcgatagcgagggtggtctggtggacaccggtaatcaccagcggcgcgtagaggaagccgaacagcgcggcgccgatcggcgcgaagctgccggttaacagatggcgtaccgcgaaggccacgccgtcgccgatcaggcggccgaacggaccgataatggcgtgcgcgaggaacaccgcgaggatcagcgagcagaccgggacaatcaccaggtagaggtagtcaggcacaatgcgcttgaggcgcgtctcgataaagcctaaggccaggccagccagcagggccgggatcacctgcgcctggtagccgactttggcaatggtaaacaggccgaagttccacacctccggcacctgctggccgaggagataggcgttcatcagctgcggggagacgagggtgacgccaaggacgatcccgaggatcggcgtgccgcccatcttcttcaccgctgaccagcagatccccaccggcagatagaagaagatcgcctcgccaatcagccacaggaagtcatagatggttttcagcgacgggtgcatctgggccagcgtctggccattgctcatgggcaggtcgccgataacgttgcggaaaccgaggatcagaccgccgctgatcagggccggcagcaggggaaagaagatctcggcgaagtgcgagattaactgttcatgccacttcatattttgccgcgcggcctgcttgacctgctctttgtcggcggaggtctggccggtggtcgccagcagggccttgtagtaatcgcccacctcggtgccgatgaccacctggaactggccggcgttagtgaagcatcccttcaccatgcgcagctgctcaatctcttttggtctggcgatggccgggtcgttcagcacaaagcgcaaacgggtaatacagtggctgacggtggcgatgttaccgcgcccgcccaccagttcgatcagtttatcgatgtcctgctggtttactttgctcatgatgaagcctcaaaaacagagggggagagatgccgtttttaccttgagggcatcctaaccgttccgcttaatttgcaaaatgggaacgttcccgaaacccggcgacgatcacataaatcgcccgagcgagattaattgagggcggcgggaatcacgatctggcggggatcgacgctgccggcgatctgctcgatcaactgccgggcggcccggcgtccggactcggcatagcccggatcgacggtcaagatttccgggtggagaaacttcatcagcggcgtgctgccgacgctggcgagctgcagcgcatcgcgaccctgctgctggaggtacttgctggcgccgagggcgagggtatccgtcgcgcagaccagggcgctggtttcagccgtcagcacgctggcgacggtgtcatatccctgcttcatgcccagccccggcagggcggcggtgggcgtcagacgatgctttttacagaaggcgaggtaggccagatggcggcgttcgccggtggtgacgtcgctgtgcggtacgccaagaaaactgatgtggcggtgtccgcgatcgtagagccgctgcatcagcagcgtgatggccccctcgtcgtcatagcacaccgaggcgaagccgggagcgtcgcgggccatcagcaccagggtgtcgcgccagggggcgagcatcgcttcgtcgatgccggtaaaaccgaacagtaccacgccgtcaatattgcgccgggcgagcatgccgagatgctccaccaccaacgccggggagaactggctctccatcataatcggatcgtaaccctgctcataaaaggcgggcagcatggtctgcacggcaaggttttccgacagcgaatcgagacgggtgacgataatcgccaccactttatcgctctggccgcgcatggcgcgggcggaacgggagggcgagaaaccgtgctgctgcatcaccgcttcgacgcgctcgcgggtccgttcgctgaccccgctctcgttgttaaggacgcgggataccgtcgatttccctacgccgcttaagcgcgcgatatctttgatggtcagccggttctgcatgcggaattctcgtcagggatggtagaagtgagcctaatgctactcaaccaaaccgcaatgagcaaagtctggtttacgttcggtttagttgcgcgggtttatcatcgccattattgccacacaatcctcagcgagggcgctataattcgcgccgtttatattcacttaccggagatagttatggaccccgatcccactcctcatcctcgatggagcaacctttctttccggtaagcctgtttaacactgctttaccggaaagcgtaaagcagtgacgtccttgatgtccctgccataaaaataacatgcctgacaggtaggttttgctacgcccgtcggcaacgctgcgttcgctttggcgagcgcggagggactgtttatgctgaaaaattatacccggcagctgttcgcgcagcttagccgccatctgccacgtcgtttagtccagcgcgatccgctgccggacgcccgccatctggcgagtggccccattcctgaatcgcttggtcagcattgcctgaacgtggcggcgatggacgaccaggagatctggcgcgcctttgacagccaccctgaagggctcaatgaaggcgaagtggcggcgaaaatcctcaaacatggtgacaaccagatcccggcgcagaagccctccccgtggtgggtgcatctgtggacctgctatcgcaacccgttcaacctgctgctgaccgtgctcggcatcgtctcctattccaccgaggatctgttcgccgccggggttatcgccctgatggtggggatctcgacattgctcaatttcatccaggaggcgcgctcgaccaaagcggcggatgcgctgaaggcgatggtgagcaacaccgccaccgtgctgcgggtggtgaacgagcagggggagagccgctggctggagctgcctatcgaccagctggtgccgggcgacattatccggttgtcggcgggggatatgatcccggcggacctgcgtatcctgcaggcacgggatttattcgtcgcccaggcctcgctgaccggcgaatcgctgccggtggagaaagtggcccgcagccgcgatccgctgcagcaaaacccgctggagtgtgacaccctgtgctttatgggcaccaacgtggtgagcggctcggcgcaggccatcgtcttcgccaccggcggccgcacctggtttgggcagctggccggccgcgtcagtgaacaggagagcgagccgaacgcctttcagaaaggcatcagccgggtcagcatgctgctgatccgctttatgctggtgatggccccggtggtgctgctgatcaatggctacaccaaaggcgactggtgggaggcggcgctattcgcgctgtcggtggcggtcggcttgacgccggagatgctgccgatgatcgtcacttcgacgctggcgcgcggggcggtgaagctgtcgaagcaaaaggtcatcgtaaagcacctcgacgccattcagaatttcggcgcgatggacatcctctgcactgataaaaccggcaccctgacccaggataagattgtgctggagaaccataccgacgtctccggcaaggtctgcgagcgggtactgcatgccgcctggctcaacagccactaccagaccggcctgaaaaacctgctcgacaccgcggtgctggagggcgttgagctggatgccgcccgcgggctggcggaacgctggcagaaggtagatgagatccccttcgacttcgaacgccgccgcatgtcggtggtggtgaaggaggatgacgccgcgcatcagctgatctgtaaaggggcgctgcaggagatcctcaacgtctcgacccaggtgcgctacaacggcgatatcgtaccgctggacgacaccatgctgcgccgtattcgccgggtgaccgataccctcaaccggcaggggctacgggtggtggcggtggcgactaaatacctgccggcccgcgaaggcgactaccagcgcgccgatgagtcggacctgatccttgaaggctacatcgccttcctcgatccgccgaaagagaccaccgccccggcgctgaaggcgctgaaggccagcggcatcacggtgaagatcctcaccggcgacagcgagctggtggcggcgaaggtgtgccatgaagtgggactggatgctggcgaagtggtgattggcagccagatcgaagccatgagcgacgacgaactggcggcgctggccaaacgcaccacgctgttcgcccgcctggcgccgctgcataaagagcgtatcgtgacgctgctcaagcgtgaaggtcacgtggtgggctttatgggcgacggcatcaacgacgccccggcgctgcgcgcggcggatatcggcatctcggtcgacggcgcggtggatatcgcccgcgaggcggcggatatcattctgctggagaagagcctgatggtactggaggagggggtaatcgaaggccgccgcaccttcgccaacatgctcaagtacatcaaaatgaccgccagctccaacttcggcaacgttttcagcgtgctggtggccagcgccttcctgccgtttctgccgatgctgccgctgcacctgttgattcagaacctgctgtacgatgtctcccaggtggcgatcccgtttgataacgtcgatgatgagcagatccgcaagccgcagcgctggaacccggccgatctcgggcgctttatggtcttctttggaccgatcagctcgattttcgatatcctcaccttcggcctgatgtggtgggtgttccacgccaataccgtggagatgcagaccctgttccagtccggctggtttatcgaagggctgctgtcgcaaacgctgattgtgcacatgatccgcacccggcgcattccgttcgttcagagccgggccgcctggccgctgttcgccatgaccctggtggtgatggcggtgggtatcgcgctgccgttctcgccgctggctagctacctgcagctgcaggccctgccgctgagctacttcccatggctggtggcgatcctggcgggctatatggtgctgacccaggccgtgaagggcttctacagccgccgctacggctggcagtgagggacgcgttttcggatgaaccacgtaaaaaaggcagccactggctgccttttttcatgccgacgagagcgatcagcgacgcacggcgatggcttcgatctcgatcttcacgtctttcggcagacgtgcgacttcaacgcaggagcgcgccgggaaggtggcgttatgctcggtgaagaacgcttcgtaagtggcgttaacggtagcgaaatcgttgaggtctttgacgaatacggtggtcttgacgatatcgccgacggtgaggcctgcggcttcaacgatcgctttcacgttgttcagcgactggcgcgcctgcgcggacacgtcttccgggacgctgccggttttcgggtcgaccgggatctggccagaggtgatgatcatgctgccgaggtcaacgccctgaacgtaggggccaatcgccgctggtgcattttccgtcgcaatagttttgctcatgttatctccagatgaactgagtaatgttacgcaaaatcattcaggttgccgccaggcggtaagcgctgtatcgccggcgcagacgccgcctgaaggacgaagcgtagggtggtagccattatagggaggcctaccaccaataccaaccgcatttagttggccagcaccacataatgagaaaactctttttcgcagtatttgcatttgagtgcgatgtcatcagcgcgttttttcactgcaaaactggaagaaaccggttcggcgtggctgatacagttgctgttcgggcagaccagcacgctgtcgatacgatccggcaggctcgggcgggatttgcccaccacttcgtaatcatcaatgcggtttaccgtcgcctgcggggcgtacagcgacagctggttaacctgctcgtcggtcaggaaggtgttctcgattttaatcaaatccttgcggcccatctcgccggagggcaggttcaggccgatggtgatgcgctggtcggtttcggtcagtttgaacagggtgagcagcttaaagccgacctgcgccgggatatggtcaatcacggtgccgcgtttgatcgcttctacctgcagtttattgtcgtgtgtcatctctcattcccccttacagtgccagctcgctattcagtaccagtgccagtaacgcctggcgggcgaagatgccgttaccggcctgctggaagtaccaggcgtgcggtgttttatcgacatcggtggtgatttcatcaatgcgcggcagcgggtgcagcaccttcatattggcgcgcgccccttcgaggtcggcggcgcgcaggacgaattgcgctttgacgttggcgtattccgacggatccagacgctctttctgcacgcgggtcatgtacagaatatccacttccgccatcacgtcgtcgatggcgctatgcaggctccaggcgatgcctttttcatcgagcatatcgaggatgtactgcggcatggccagcgcgtccggggcgatgaagtagaagcggttgccgttgaatttggccagcgcctgggtcagggagtggacggtacggccatacttcagatcgccgaccatcgccacgttgaggttttcgaggcggccctgggtctcctgaatggtgaacaggtcgagcagggtttgggtcgggtgctggttagcgccgtcgccggcgttcagtaccggcacgccgccggagaattcggtcgccaggcgcgcggcgccctcctgcggatgacgcatcacgatggcgtcgacgtaggtgctgatgacggagatggtatccgccagcgtttccccttttttgcccagtgaggtgttggcgctgtcggaaaagccgaccacgctggcgcccaggcggtgcatcgaggtttcaaaagagaggcgggtgcgggtcgaggcttcaaagaaacagctggcgataaccttatgcttcagcagctcgggttgtggattggctttcagctttgccgccgtcgccagcaccagttcgaggtcttcgcggctgagatcgtttatggaaatgatatgtttttgatatagcgggttagccatgcttatctcctgacgcctgggcaaaaaaaaagccccttaaataaggggcttcgggaatccaatgagcaacggaaagaaaaacggcaggccagcgtctgcattgagacgcgctaagacagaatgtcgtacgcaattggccatgcttcctcccggcaaaacgactggcattatacgcagaccgttatgacgatcaagcgattcattcacaaacaggtaatcgtttgcctgtcgaaaagtgcgccagcgcaaagaagcgtgaaactgtactggtatggcagccgcgatgggggtataacacgataaaatgaaatgctgttttatatttgaggtaagcaatgattattggcaatatccaccatctgcagccatggctgcctgccgcgctgcgcgaggctatcgaacaggttatcgctcaggtcagcgaggcgacgccgctgggtaaacacgctatcgacggcgacaacctgttttatctgatttctgaagacaccaccgagccgcaggccgcgcgccgcgcggaataccatgcccgctatctcgatatccagattgtgctccgcggcagcgaggggatgaccttcagcaccttgccgccaggagagccgcagaccgactggctggcggagaaagacatcgcttttcttgccgaaggccggcaggaaaaaacggtgatccttaacgaaggggattttgtggtgttttatcccggcgaagtgcataaaccgctgtgcgccgttggcgccccggcgaaggtgcgcaaagcggtggtgaagatgctgatggcgtaaaatggcgaaccgaatcccggatgaacgccgtgccatccgggacacagccgcgagcgaggggctatttgctcagcgtcgccaccatcaccgctttgatggtgtgcatccggttttccgcctggtcgaagaccacgctcgccgccgactcaaacacctcgtcagtcacctccatgccgccgtgcaggccgtaatcggcagccatctgtttgcccagcgtggtctggtcgtcgtggaacgccggcaggcagtggaggaacttgacctgcgggttgccggtcagcgccagcatcgcgctgttaacctgatagtcgcgcagcagggcgatacgttcggcccatttttccttcgcctcgcccattgagacccagacgtcggtatagataaaatcggcgcctttcacccctgcggcgatatcttccgtcagggtgatgttgccgccctgctgtttggccagcgcggtgcaggtctccaccagcgcggcctccggccagcaggccgatggcgccaccaggcgcagatccagaccggtcaaggcggcggcttccagcatcgaattgcccatgttgttgcgcgcgtcgccggcgtagaccagcgtcatctggttaaaggctttgcccggcagatgctctttcatggtcagcaggtccgccagcagctgggtggggtggaactcgttggtgaggccgttccacaccggcacgccggcgtattgcgccagggtctctaccacttcctggccgtggccgcggtactgaatgccgtcgtacatccgtccgagcacgcgggcggtgtccttgatcgactctttatggccaatctggctgccgctgggccccagataggtcacgcgggcgccttgatcgtatgcggcaacttcgaaagagcatcgtgtacgggttgagtctttttcgaagatgagcgcgatgttttttcctgccagtttctggacttcgataccgtttttcttatcggctttcagctttgccgccagctcgagcagggcggtgatttctgcaggcgtaaaatcgagtaactttaaaaaatgcttctggtaaaacgcagacatggttccctcacctggcataggccactaattgaattaaaattcaatttatatgtatgaatattcatttgcaagtctgtgatcgaaatctttcactgagaagtggaggcaatgacggcggtatgtgacaatagggataactgccgcacattatgaggaacgagccatggcaaacccggaacacctggaagaacagcgtgaagagacgcgtctgattatcgaagagctgctggaagatggcagcgatccggacgcactgtacacgattgagcatcacctctctgcagacgatttcgaaaccctggagaaagtggcggttgaagcgttcaagctgggctacgaagtgaccgagcccgaagagctggaagtggaagagggtgacatggtcatctgctgcgatattctgagcgaatgcgcgctgaacgcagacctgatcgatgcccaggtggaacagctgatgacgctggcagaaaaatatgacgtcgagtatgacggttggggcacctattatgaggacccgaacggtgaagacggcgacgacgatgacgaagagtatgtcgatgaagacgacgatggtgttcgccactaagtcgcaaatgtcgtagatggatacggcggcgcctgccgccgtatagcaaggaaccttcatggattacccgcagattctttccccgattatcaacttcctgcactgcccgacgccgcaggcgtggattgacgaagcccgcaagccggaaaacctgccgctgctgctgaccgaccacatggtgtgcgagctgaaagcggcgcagaacgccatgctgctggtgcgtcgctacgtcgcggataaagctgacgccgacgaactgttggcctgcctgaagccgtacgaagacttcacctaccgccgggggccggagccggattttgtctccctgcataaacggatcaacaaaagcgccatgccgcagaccgacgacccgtggggccgccagctgctggacagcatgattttgttgattaaagaggaactgcatcacttctggcaggtgcgggagatgatgctggcgcgcgatatcccctacgtcaaaatcaccgccagtaactatgcccgcggcctgcggcgcgaagtgcgctcgcatgagccggtgatgctgatcgataagctgatctgcggcgcctatatcgaggcccgctcctgcgaacgctttgccgccctggcgccgtggctggacgacgatctgcagaagttctacctgtcgctgctgcgctccgaggcgcgtcactatcaggactatctggatctggcgcagaagattgccggagaagatatcagcgagcgggtgcgccagctcggcgaggcggaagcggcgttgatcctccgtccggaggccgagttccgctttcacagcggtgtgccggtagcggcgtaacccacgatattcgggcccggtagtcactaacaccggcagtttcagtagccatggggagagatagcgttgagagcttcagctcgcaatggtacgggccgtaggtcgggtaaggttagccgccacccgacaaaaaaacggcaccgcgagcacgggtaaggtgccattcgggacatacccggctcgcgctacgcttaaccgggctaccgaactgtagccccggtaagcgtagcgctaccggggacgcctgcgatatcgaggcgctacagcgttttcagcatccgtacttcgcagtccacgtggccggtgcagcccagcggtccgtcaatgtgctcgaagccgagatgttcatataagccgatcgcctccgtcaggaaggcggtggtttccagatagcagcgcttaaacccttgttcgcgggcgtagtccagcgccagcagcgccagcttcttcgccagcccctggccgcgggcgctggtcataaaatacattttctgcagctcgcagatatccggctcgctgcaggcgagcggcgcgacgccgccgccgccaaccacttccccctcttgctccaccacccagtaggcggagcccggctggctgtacagctcatacagttcatcgagattcgggtcggcgaccgtatagcctttatcggcggtcaggccatattcagccgagacctggcggatgaccctggcgatggcggcattgtctgccgccgtaatgcgacgcagcaacgtcgccgcggggacgctcgtattcatacaatgactcattacccaaaaaagacgaatgatgatgttaataacatcgcgacaggggaaagcgcaagcgaggatgtttcataaaaaacgccccttgccgggtggcaaggggcgggaggatcacagcgcggcgatcaccgcctgctgttcaatcagcttcgctttcgcttccgcgtagccttccagcttctcgcgctctttagcgatcaccgcttccggcgcgcgggcgacaaagccttcgttggccagcttgctctcgatgcggccaatttcaccttcgattttggccacttctttcgccagacgcgccagctcatcttctttattgatgaggcccgccatcgggatcagcagctcggcgccgtcgacaatcttggtcaccgagaccggacctttatcatcggcaggcagcacggtaatgctttccagacgcgccaggttcagcaggaagctgcggttgtcgttcacacgacgctcggcctctttgctgcagccgcgcagcagcagttccagcggtttgcccggagcgatgttcatttccgcacggatgttacgcacggcgacgatcgcctgcttcagccattcggtgtcggccagcgccgcgtcatccacctgagaagcatcgtactgcgggaacggctgcagcatgatggtgtcggcggtgatcccgcagatcgctttcacgcgctgccagatggtttcggtaatgaacggaatgatcggatgcgccaggcgcagcagaccttccagcacggtgaccagagtatggcgagtcccgcgcagctccgcttcgttgccaccgttcataaccggcttggtcagctccaggtaccagtcgcagaactggttccaggtgaactcatacaggatgccggcggcgatatcgaagcggaagttatccagcgcttcgcgatatgctttcacggtgtggttgaattccgcgatgatccagcggtcggccagggagagcaccatttcgccgccgttgaagccgcaatcctgatcttcggtgttcatcagcacgaagcggctggcgttccacagcttgttacagaagttacggtaaccttccagacgcttcatatcccagttgatgtcgcggccggtagaggccagcgccgccagggtgaagcgcagggcgtcggtgccgtgcggctcgatgccgttcgggaactgtttctcggtacgcttgcggattttatccgccagctgcggctgcatcatgttgccggtacgtttttccagcagctccggcagggtgataccgtcaaccatatccagcgggtcaatgacgttacccttggacttggacatcttctggccttcgtcatcgcggatcagaccggtcatgtagacggtcttaaacggtacctgcggcttgccattttcatctttgatgaagtgcatggtcatcatgatcatgcgggcgatccagaagaagataatgtcgaagccggacaccatcacgctggtcgggtggaactgacgcagggcgtcggtgttttccggccagccgagggtggagaaggtccacagcgcggaggagaaccaggtatcgagaacgtcttcatcctgacgcagggcaacgtcggcgctcaggttgttttcctgacgcacttcgtcttcgctacggcctacgtagacgttgccgtcgttgtcataccatgccgggatgcggtgaccccaccacagctgacgggagatacaccagtcctgaatatcgcgcatccaggagaagtacatattttcgtactgcttcggcacgaactgaatatcgccgttttcaacggcttcgactgctggcttggccagcatgtccgcgcgcacgtaccactggtcggtcagcatcggctcgatcaccacgccgccgcgatcgccgtaagggacggtcaggtcgtgcggtttgatctcttccagcaggccgagggcgtcaaccgccgcaacaacggctttacgcgccgcgaagcgttccagtttctggaactccgccgggatctcgctggagtagacgtcggattcattgcctttggtgtcgtagacttccgcgctttcgcggatgtcgccgtcaaaggtaaggatgttgatcatcggcagctggtgacgacgacccacttcgtagtcgttaaagtcgtgcgccggggtgatcttcacgcagccggtgcctttttccatgtcggcgtgctcgtcgcccacgatcgggatgcggcggttaaccagcggcagcaccacgaatttgccaatcagatctttgtagcgcggatcttccgggttaacggccacgccggtatcgcccaagagggtttccggacgggtggtggcgaccaccaggtaatctttatcgtcagcggttttcgcgccatcggccagcgggtagcggatgtgccacatggaacctttcgattcgcggttttccacttcgaggtcggaaatggcggtgcgcagtttcgggtcccagttaaccaggcgtttgccgcggtagatcaggtcttctttgtacaggcgaacaaagacttctttcacggcattggaaagcccctcgtccatggtgaagcgctcgcgctcccagtccacggagttgccgagacggcgcatctgacgggtaatggtgccgccggattccgctttccactgccagattttgtcgataaaggcgtcgcggccgtagtcgtggcgggttttcccttcttcagcggcaatcttacgctcaaccaccatctgggtagcgatacctgcgtggtcggtaccggcctgccacagggtgtttttgccctgcatgcgctggtagcgaatcatggtatccatgatggtttgctggaaggcatgacccatatgcaaactgccggtgacgttcggcggcgggatcatgatgcagaagctctcctggctttcatcaccattcggtttgaaatagccctgcttttcccagtgctcgtaaagcggctgttcgatatcttgtgggttgtatgtcttttccattatttccaggttgccgtgttcaggttgaaaccagccatgcggtacgccttatagcgttcgcgcgccagttgtttcagattttcttcgtaagggacaaagtctatcacttctgtgaaagcggtggcaaaatctgcaaagttaagccgcaggctgatcagaatatcccgcgggctgctgttgcgcttttgcggccaggcaatctctaccggcgcgccgcctctcgggccttcgcccgccagattatgcggcacaaagctctccggcggccgcgaccacagcgcctcgtcgaggcgaatcgcctgctgttcatcttcgcaggcgatcaggacgcgcttgccgttgcgccaacgttctgcggcaatgtcacacaccagctgctcgacggcgctcaggccatcgacggtggcgtcattgtccagaagatagaacgttgcgtttttcatatatggggcttcttgttgtggatttaaatgcaaagccgggcggcgctacgcttacccggcctacagtgtgctgccgtttgtaggccgggtaaggcatcgccgccacccggcatatcacatcactcttcgccgttaaaacccgcacgattgagcaggaactgcgacagcagcgccaccggacgaccggtcgcgcctttggccttaccggaacgccaggcagtaccggcgatgtcgaggtgcgcccagttgtacttgcgggtgaagcgcgacaggaaacagccggcggtgatcgcgccgccaggacggccgccaatgttcgccatatcggcaaaattggactccagctgatcctggaactcgtcggccagcggcaaacgccatgcgcggtcgcccgccagttcggaggcgccgattagctcatgggccagcgggttatggttcgacatcaggccggtgatgtgatggccgagggcaatcacgcaggccccggtcagcgtcgccacgtcgataaccgcttccggctcgaagcgctcaacgtaggtcaggacgtcgcacagcaccaggcggccttcggcgtcggtgttcagcacttccaccgtctggccggacatagtggtcaggacgtcacccggacgataggcgcggccgccaggcatgttttcacagcccgccagcacgccgatgacgttcagcggcagctgcagttcggcaaccatccgcatcacgccgtacaccgccgccgcgccgcacatgtcgtacttcatctcgtccatgccttcggcaggcttgatggagataccgccggagtcgaaggtcaggcctttaccgaccagcacgatagggcgcgcgtcctcagccgggttacctttatattcgatgaccgacatcagcgactcgttctgcgacccattgccgacggcgaggtaggcgttcatccccagctcgcgcatctgctgttcgccgatcacccgggtgatgacgtttttgctgtaggtatcggccagctgacgcgcctgggaagccagataggcggcgttacagatgttcggcggcatattgccaagatctttcgccgctttgatgccggcggcaatcgccaggccatgctgaatggcgcgttcgccgctggtcagctcgcgacgggtcggcacgttaaagaccattttacgcagcgggcgacgcggctcgcttttgttggtcttcagctggtcgaagctgtacagcgtctctttggcggtttcaaccgcctggcgaactttccagtagttgttacggcctttgacgtgcagctcggtcaggaagcagacggcttccattgagccggtatcattcagggtattgatggttttctggatgacctgcttatactgacgctcatccagctcgcgctctttgccgcagccaatcagcagaatgcgctcagacagaatgtttggcacatggtgcagcaataacgtctggccaggtttgccttccagctcgccgcgacgcagcagggcgctgatgtagccgtcgctgattttatcgagttgttcggcgatgggggagaggcgacgtggttcaaagacgccgaccacgatacaggcgctccgctgcttctccgggctaccgctttttacactgaactccatgcactatgctcctgaatcttaaagacaacagtggtggctacggctatactcgtcgcctttcaagttgcagatgcgccggctgcgcctgcttaccctgacgtggcacattgtgcgcgccaggggccacagccctgctgccttcttacaactcgaaatccattgagtatataattgcaagctttcgtaactcatatccgctgttgcggtgacttcgtgttaatcttaacgttattaaggcctgggttcgtcagaaaagatcctgacatgcagaaccgatgagtcatttaatcttagcgacgttttcgacgaccaaagagaataaatgacgtttaagccatgaaacaagcaattttcctgcactaaaacgggtttttacgggcgtatttatagtgataatcataagatatctggttcgtgagacgctgaaaagccagttggcgatcctattcatcctgttactgattttcttttgtcagaaattagtcaggatcctcggcgccgcggtggatggcgatatcccaaccaatctggtgctctcgctgttggggctcggcatcccggagatggcgcagcttatcctgccgttaagtctgttccttggcctgctgatgaccctcggcaagctgtacaccgaaagtgaaattacggtgatgcacgcctgcggcctgagcaaagccgtgctgatcaaggcggcgatgatccttgcgctgttcaccggcgcggtggcggcggtcaacgttatgtgggcggggccgtggtcgtcgcgccatcaggacgaggtgctggccgaagctaaagccaaccccggtatggcggcgctggcccagggccagttccagcaggccagcgatggtaacgcggtgatgtttatcgaaagcgtcaacggcaaccgcttccatgacgtcttccttgcccagctgcgtccgaaaggcaatgcgcgcccctcggtggtggtggcggattccggcgagctgtcgcagcagaaagacggctcgcaggtggtgaccctcaacaagggcacccgctttgaaggcaccgcgatgctgcgcgacttccgcattaccgacttcaataactatcaggctattatcggccaccaggcggtgagcgccgatccggacgacaccgaacagatggatatgcgcaccttgtggaaaacccacaccgaccgcgcgcgcgccgaactgcactggcgcttcacgctggtggcgaccgtcttcattatggcgctgatggtggtgccgctcagcgtggtgaacccgcgtcagggccgtgtgctgtcgatgctgccggcgatgctgctttacctggtgttcttcctgctgcaaacgtcgattaagtcgaacggcggcaaaggcaaaatggacccggctatctggatgtgggcgattaacctgctctattttgcgctggcggtgctgttaaacctgtgggacacggtgccgatgcgccgcttccgcgcccgttttaataaaggagcggcctgatgcaggcgtttggcgtacttgaccgttatatcggtaagacgattttcaacaccatcatgatgaccctgttcatgctggtgtcgctctccggcattatcaagtttgtcgatcagctgaaaaagtccgggcagggcagctacgatgcgctgggcgctggtctctacaccatcctcagcgtgccgaaggacatccagatcttcttcccgatggcggcgctgcttggcgcgctgctggggctggggatgctggcccagcgcagcgaactggtggtgatgcaggcatccggtttcacccggctgcaggtagcgctggcggtaatgaaaaccgcgatcccgctggtgctgctgaccatggccatcggcgagtgggtggcgccgcagggcgaacagatggcgcgcaactaccgtgcccagcagatgtacggcggctcgctgctctcaacccagcaggggctgtgggcgaaagatggccacaactttgtctatatcgaacgggtgaaaggcaacgatgagctggggggcgtcagcatctatgccttcaacccggagcgtcgtttacagtcggtgcgctatgccgcttcggcaaaattcgatagcgaaaataaagtgtggcgtctgtcgcaggtggatgaatccgacctgaccgatccaaagcaggtgaccgggtcgcagatggtgagcggcacctggaaaaccaacctgacgccggacaaactgggcgtggttgccctggatccggatgcgctgtcgatcagcgggctgcacaactatgtgaaatacctcaagtccagcggccaggatccgggacgctaccagctcaatatgtggagcaaaatcttccagccgctgtcggtggcggtgatgatgctgatggcgctgtcgtttatctttggcccgctgcgtagcgtgccgatgggcgtgcgggtggtgacggggattagcttcggctttatcttctatgtcctcgaccagattttcggcccgctgaccctggtctacggcataccgccgatcatcggcgcgctgttgccgagcgccagcttcttcctgataagcctctggctgatgatgcgcaaggcctagcgggtaagcctgaaacgtaagccccctcagcgatgagggggcttttttttagcgcttgcgtccgcccagcaggctgcccagcatgccgcggacgatctgattggtgacctggcgaaccgcgcttttcgctgcggtctgcacgataccgtcgcgtttaccgcctcgcgggccggtgctgccgaacaggatatctttcaggccgccaagcagcccgtcgtcttccccgctctgctggcccttcgccggcggagccgactgctgcccggtggcgacctgcaccccttgctgcagcatttcgaaagccgactcgcggtccacctcctcctcatacttaccgtacagcggcgagtggttcagcagaccattgcgctcgtcatcgctgaccggccccattcgcgaacagggggcgataaccatcgcccgctcgaccaccgacgggctgcctttctcatcgaggaaggagatcagcgcctcgccggtgcccagctcctggatcgcctgctcggtactgaaggccgggttggcgcgcatggtctgggcggcggttttcaccgccttctggtccttcggcgtaaaggcgcgcagggcatgctgcacgcggttgcccagctggccgagcacggcgtcgggaatatccgccgggttctgcgagacaaagtagacgccgacccccttggagcggataaggcggatcacctgttcaattttatccagcagcacctgcggcgcgtcgttgaacagcagatgcgcctcatcgaagaagaacaccagcttcggtttatcgaggtcgccggcttccggcaggcgctcgtagagctcggagagcatccacagcaggctggcggcgtacagcttcggcatctggtagagcttttcggcgctaaggatattgatcacccctttaccgctggcatcgacgcgcatccagtcggcaatatccagcatcggctcgccgaagaagtgctcggcgccctgttgctccagggtcaacagcccgcgctggatggcgccgatcgaggcgctgttaatattgccgtactggttctggaaagacttggcgttatcgccgataaactgggtgatggcgcggaggtctttgaagtcgagcagcagcaggccgcggtcgtccgcgatgcggaaaataatgttcagtacgccgctctgcacctcgttgagattgagcaggcgcgccagcagcagggggccgagatcggagaccgtcgcccgcaccgggtggcccttctcgccaaagatatcccagagcaccaccgggttggcgtgcggctcccagtcgctgacgccgatcttctccagccgcgcctgcagtttctctgagctctgccccgcggcggcaatgccggtcaggtcgcccttgacgtcggccataaataccggcacgccaatctccgagaacgactcagccagcttctgcagggtgacggttttaccggtgccggtcgcaccggtgataagcccatggcggttggccatcgcgggcagtaaatagagcgcgttatccagcgtgcgcgcaatcaacaggggtgagctcatggtcgattcctccatttatcctgcgacgattataggcaacctcgtcgtccggcgttgggaaaatcgtcacgcgccgcgcacgctgtaccgtgagggtctcaggcgcagtggcgctggatgagcgcgatgctctgctcaatttcgcgctcgatatccgcttcgctccattgcgccagctcgggggcgaagggctcaaaagcgtacaccccctgatagccgcgggcttccagcgctttaacctgctcgcaggtgccgagacgatcctgcggggttagcatgatgcgctcggcatcggtgagctgctcgcgcggacggctatcgtccactcctgaaaggtgcaccagcccgatatccgccacctctacctggctgaactcgtccgccgcctgcgggtaaagatggtgatggaaggtatcgatcagcagcttaaacggcacgcgggcgtcgtggatcagcgtctgcgcctggtgcgcagaacgcagcgagctttgcgggaagcccagcggctccaccaggccgtggatgccatagaaggcgaacagcggcgccaggtcgcgcagggcgcccagggtttcgctggccggcacctcgctgccgtcgttgagcggacagagcaccagcgatttggcgccgatggcctgggcctctttcagcagcgattcggtcaactgccgcacctcttcgctacgacggttaaaggggtagaccgcgttaatcgtcaggatctcgatgtggtagcgcgccgccagctcgcgcacctgctgatggctcagatcgtcggtcacttttccgctgggtaaatcgttgcgcagctcgaccttattcaggcccagacggttcaccagacggaaaaacgcttcaatgctgagcgctggcgcgattttgcggttaatacaaaaacgttgcattgcgatggccataggacactcctgacggaagagggggtaggttcgttcaattggctaacagtcaaaacgtttattccaaaattagcaagaatggaaatgatgaatgtttgagctgtctcgcaaaatatcaccggcaccgactaccggcgcgacagcggcgggaagcctggcgtcgagggaaacgaggcgcgatgcgggaagcgcacaggcgaccggttagcgcaaaatgcgactgttatcaccaaaatgaaatttcatttcacaacaatgttgaaatataaatttcattttactacggttatagcacagcagaatcagcgacgggccggtgtgcgctggcccccttcactatgaggcgagaacatgacgatcacaggaaactttattggcgggaaaaccgttattagcagcagcaacgaaacgatgccggtgtacgacccggcgacgggcaaagcggtgcgcgaagtcacggtgtcaaccgcgcaggaagtctccgaggcgattcaggttgctcgcgatgcgtttgacagctggtcccgtaccacgccgctgcgccgcgcccgcgtgctgttcaacttcaaaatgttgctggagcagcacgtggaagagctggcggggatcatcgtcagcgagcacggtaaggtgtggtcggatgcgctgggcgagctgacccgcggtatggaagtggtcgaattcgcctgcgggatcccgcacctgattaaaggcgaatactcctctgacgtcggcaccggcgtcgacagctactcgctgatgcagcccctgggcgtggtggcagggatcaccccgtttaacttcccggcgatggtgccgatgtggatgttcccgctggcgctggcctgcggcaacagtttcgtcctcaagccgcccgcgctggcgccgacggccgctgtgcgtctggcagagctgctgaaagaggccggtctgccggacggcgtgtttaacgtcgtgcactgcagcaatgaagatgccgagcagctgtacactgacccgcgtattgcggcggtgagcttcgtcggctcctccggcgtggcggagtatatctataagaccgccagcgcccacggcaagcgagtgcaggccttcggcgccgccaaaaaccacgcgattgtgatgccggatgccgatctcgacgccaccgttaacgccattatgggcggcgcttttggctccgcaggcgagcgctgcatggcgctgccggtggtggtggcggtgggagatgaaaccgccgacaaactgatcgcccgcctgaagccgctggtggaagcgctgaaagtaggtccgggctgcatgcgcggccaggaagagaacgagatgggaccggtggtgtctgatacccaccagaaaaaagtgctcggctatattgataaaggcgaaagcgaaggggcaaaactggtggtcgatggccgcaaactgcgcgtgccgggttacgacgcgggctactatgtcggcggcaccctgttcgatcacgtcaccccggagatgaccatctggcgcgaagagatctttggcccggtgctggggattgtgcgcgcggcggactatgacagcgcccttgagctggtcaacagccacgaatttggcaacggcagcgccgttttcaccagcaacggccacaccgcgcgtgaattcgtccacgacgtgcaggcggggatggtcggggtgaacgtgccggtcccggtgccgatggcgttccacagcttcggcggctggaagcgctcggtgtttggcgcgttgaacgtccacgggccggacggcgtgcgcttctacacgcgcatgaagaccgccactgtacgctggccggcagggcagcagaccgtatctgaattcagcatgccgacgttaggttaatcggcgaaggagagcgccatgtcgttactggctaaatcgcgaaaagagggacagatccagcatattacgccgcaaagcgccggttggcgctatatcggctttgatgtctggatgttgaaaaaagggcagaccgtgacgctggagagcggcgatcgcgagctgtgcctggtgctggtcgccgggctggcgtcggtgaaaacgcaacatgccgatttcccgaatctcggtaaacggatgtcgccgtttgaacgcaccccgccgtggtcggtctacgtcccgccgcaggataaagttgaggtgaccgccgattccgatctggagctggcggtatgcagcgcgccgggcaaaggcagcttcccggcacgcctcattcggccggaagacgtcggggtagagcaccgtgggaaagggcgcaatcagcgccgggtgcataatattctgccggacagcgccgaggcggactgcctgttggtggtggaagtctacaccgacgagggggccaccagctcgtggccgtcgcataagcatgataccgcccagccgggcaaagagacgcagctggaagaaacctactatcaccgcttcgatccgccgcagggctttgccttccagcgggtctacaccgacgaccgcagcctggacgcctgtatggcgccctacaaccacgatgtggtgatggtgccgcgcggttaccatccggtggcggcgattgccggttacgacagctactatctgaacgtgatggccgggccggaccggaaatggctgttcacctgggaagatgaccacgcctggatcaacacgccggagtacccgcgccacgactgacgcgcggtgcagaagcggataaggaaggccggttagcgatgctaaccggccttcctgtttgagggcggtgggtgttttttcgcgaaacgctccgcggaatcccactccccgacccggcaagcgcagcgccgccggggaggacacctccggcgccatacccgcctttgtgccggatggcgctacgcttatccggcctacgggagcctcccgtaagctcctataccccaggcccggcaagcgcagcgccgccggggaggacaccgcagataccgtagccatttttgtgccggatggcggcacaaatgccttatccggcctacggcatcctcccgtaagctcctataccgtaggcccggcaagcgcagcgccgccgggcgatgaccacaggcacggcgctgcttttatgccgggcggcggctcacgccttgcccggcatacggttcgtgcgacctgccgttaatttattcaccattgttgctgaaactgccggtgttgcggcctcaacatcgctgagacgttcccggaaggccggggcagcccgcatggatgcgggctgagggccgtgttttgcacggacgctgcctcggcccgacccgaagcctgcagggataagtcgaagggaccgcgtagcggcgattttgctggccggagcccgggggtacagggggcggcggcctgtgcgctccctgcgccatgccaggcataacgcagaagattaaccgggagcgcaatgtgcgctgaaatcacatgcgacaaacgcttttcccggattaatagagttgcataccaataacattatctccggcaccccgcaggcgcatataccccaggcccggcaagcgcagcgccgccgggcaggacaccgcagacaccatacccgcctttgtgccggatggcgctacgcttatccggcctacggcatcctcccgtaagcctatactgcgccgccgagtaacaaacgccaggcagcctatctcacgccttctgcttggcctcggactcctggctgctgttcagcgccagcgaaaccgccagcgtctgggccagacacagggaagcaacctgcgagcggaagccatccacctgcgcttcacgcaccacaaagcagacatcgctgaaggccgccagcgggctgacctggctgtcggtaatggcgatctgccgcgctttgcgctgcgcgcccagctccaccagctcgaccacttcccgggcgtacggcgagaagctcaccgccactaccacgtctttcggaccgaccaggctcagctgctcggtgaacatgccgccgaggccgtcgatcagaaaggctttgcgatcgaggtgacgcagcgcataggtcagataggaggcgacgctaaacgaccggcgcagaccaatgacgtaaatattttccgcctcgcccagcagggccaccgcgcgctccagatcatcgctggaggtctgcatcgccagctgctgcagcgcctggttgttcaccatcgtgaacatattgaggatttccgttggcgtttccggcgggctggactcatcgctggtggtctggcggaacagacgggcgcgctcggtatagttggcggtctcttccatcaaatgttgcttgaacatctgtttcatttcgttaaagccgctgaagccgaaggcgttggcaaaacgaatcaacgtggaagggggaacatccgcctgttgcgcaatggaggccacggtatcgaaagccacgctattgctgttatcaaggatatagcgggcgacctgtttcaggcgtttgcttaacgtatcgtagcgacgcctgatttcatcctgcaggatggtcagctgtgttgggttattggccataaagtgcgctctgagaaaatggaaggaatatggcttccagtgtaccaaatgaagcgaatttttcatttattgcgacgaaatacgcgattcatttcacgaagaaacagaaaaacgcccgctccgcaaggtgacggagacgggcgtcgggggatcagcggcgggcttcgcgccagtagccaatgagcgtcaggtagttgcgtttcacttcctctatcagggcctcatcgctgagctcaccctgcatccagcgccgcgacggctggccaaagatggtgcgcccgacggcgaaacctttgatcatcgggtgtgcggccgcctcggcgaaaccggcgcgcagtttgtcggaaggcgcgtcaagcccgaggatcaggatcccgcggctccacggatcttcgcgctcgatgagggcggtgatctgctgccagctggcgctggagagcggcggcagcttccaccagtccggtttgatccccagctgataaaagtgttccagcatagtgtggtaatggcgctcgtctttgtccgggccattttccggcaggatcacctccagcagcagttcatggcctgacttgttacaggcctgccagacctcgagcagcagggcgtcctgctctgcacgcagcgccgccgggtcgtccgggtgatagaagaccaggcatttgacgacatgctccagcggccagtcgatcagctgcgagccgatgttgccatgctccagacgcagcggtcgcgagctgggcagttcgatagggcgcccgatccaccagcccttgccggtaatggcgttgagcgcacgctggccgtaggtgccgtcggccagaatgccgctgcgctgatcgagacctgcctcctgcgccgccgcttcggccgcggccaacaacagcagcttgagctgcggaatgcaggcttcgtcgcgcccggtctcccgcgccagatcggccagctgtttgcgatggtcaaaggcgaaaatgcacagctccggccactgctgacggcggccggtgacccggtgcaggtggttgaggcgctcgtcgacgtccgggcgcggcaccgattcggcgcgctgcaggtagtcatcaagttcgactttggtcggcatcgccggcgcgcagccgtggcgggagactaccagcgccccgcaggcgttggcataacggcaagcctgctcccagccttcgtcgttgagccagccgcgcagcagacccgacataaaggcatctccggcgcccagcacgttgagaacctccacgcgcacgccctgctgtagcggcacctggtcccagctgtccgggatgtcgccttccagcaccacgcagcccatcggcccgcgcttgcagacgagggtggctttggtggcattgcgcacatttttcagcgcggtcagggtatcggtgctgcccccggcaatatgaaactcttcttcggttcccaccaccaaatcgaacagatgcagcacttcctgcagctggctggtgaccggtccggactcaatgaaacgggtttcgccatcgccgagcgaggtgagcccccacagcaccggacggtaatcgatatccagcgcggtgcgcaggccgtgacggcgggcgtactccagcgccttcagcaccgcggcgcgggtgttggcgtgcgacaggtgggtgccagtcaccgccagcgcccgggaggaggcaatatactcctcgctaatgtcgtcaggcgttaaggccatatcggcgcagttatcgcggtagaaaatcagggggaaggtctcctgatccttaatccccagcatcaccagcgcggtcaggcgagatttgtcggtaatcagatactcggtatccaccccggcgcggttgagcgtttcgcgcaggaaacggccgttgtgttcatcgccaacgcgcgccagcatggccgatttcagcccctgaatcgcggtgccaaaggccacgttgccggaggagccgcccagatatttcgcgaaactggcaacgtcttctagccgcgaaccaatctgctgggcatagaggtcgacggccacccgacctatacagatgacgtcgagccgctttactgctgcattcatagctaggatttcctttttggtgtctgctgcctggaagggtcgggatcccgacgtcgactccgtgaacagcctgagggttattggttacccttagtttgagaaataaatatttcatttgcaaactcgttcgaaattaaaaaaccaaaagtgtgagggatctaccactctgccgcactgagcctcgcgcgagcgcggatcgccccctctgtcgacccgggggaaaatgaaacgccaaatggcatccatttacctatgatttttaaggggatattgccgtctggtgcggcaaaaaagggcccgaaaacgtgtctggaatgtaagtgaaacgtatgaaatgggtagagagtttgatccttctcgcaaaatgaaatatttcttctgtatttgtatttaatgaaaaaaatgtttgcctataatccacaggtattccagtgacgtgaacgacggccccggcggcatcggcgcgacgccacacacaaatactgaacaataaggattgtgcatcatgggcaaactgagactgacaacggcgcaggcgctggtgaagttcctcgataaccagtacctggaagtggatggcgtagagctgaagttcgtgaaaggcattttcgcgattttcggccatggcaacgtcctggggctggggcaggcgctggagcaggacagcggcgatatgcgcgtctatcaggggcgcaacgagcaggggatggcccacgcggccaccggttttgcccgccaggccctgcgccggcagattatcgcctgcacctcctccatcggtccgggagcggccaacatgatcaccgccgccggcaccgccagcgccaaccgcatcccactgctgctgctgccgggcgatgtcttcgccacccgccagccggatccggtgctccagcagattgaacagagctacgatctcagcatcagcaccaatgacgctttccgcgcagtcagcaaatactgggaccgtattacccgcccggaacagctgatgagcgcctgcatcaacgccatgcgcgtcctgaccgacccggcggaaaccggcgcggtgacgctatgcctgccgcaggacgtgcagggcgaagcctgggattacccggaatccttctttgcgcgccgcgtgcaccgtctcgaccgccgcccggccagcgccgcgcagctggcggacgccgtggcggccatcaaagccagccgtaaaccgctgatcgtctgcggcggcggggtgaaatactccggcgcgggcgaagcgctgtcccgtttcgccgagcgctacggggtgcccttcgccgaaacccaggccgggaaggggacggtggtctcgtctcaccccctgaacgtcggcggcgtcggcgaaacgggctgcctggcggcgaacctgctggcgaaagaggccgacctggtgatcggcgtcggcacccgcttcagcgattttaccaccgcctcgaaatggattttccagcacccggaggtgcgtttcctgaatattaacgtcagcaacttcgacgcctggaagctggacggcattgccatgctggcggacgcccgggaagcgatgaccgctctcgacgcggcgctggcggacagcggctggcaggccggctggggcgcgcagatcgagagcgtgcagagccgtcagttaaaagagacccagcgcgtctaccaggcggtgtggcaggagaaatcctttgtgccggagatcgacgatcatctcgatcgtgaatcggtgtatcgcgagttccgccagatcaccgactccaccctgacccagagcagcgttcttggggtactgaatgaaacgctgccggccgaggcggtgatcgtcgcggcggcgggcagcctgccaggcgatctgcagcgcgtctggcgcaaccgcgcggaaaacacctaccacgtggagtacggctactcctgcatgggatatgaagtcaacgccgcgctgggcgtgaagctggcgcagccgcagagcgaagtctactccctggtcggcgatggctccttcatgatgctgcactctgagctggtcacctccctgcaggagcgggcgaagatcaacgtcgtgctattcgacaacatggccaacggctgcatcaacaacctgcagatggagcacgggatggacagcttcggcaccgagttccgctaccgtcagccggaaaccggccagctgcagggcggcctggtgccggtggacttcgccaccatcgccgccggctacggctgcaaaacctggcgcgtcactaccctggacgaactgcgccacgcgctggacgccgcccgtcgcgaaacggtcagcactctgattgatattaaagtgctgccgaagaccatggtgcacaaatacggcagctggtggaacgtcggagtcgcccagacggcgctctctgagcggatccgcaaggtggcgcaaatgattaatgaaaagcgcgcccaggcgcgtgattactaaaacgaacatccactctgaatcctacagacttacggagaaaaccattatgtcgctcaaattaggtgtcatcggcgctggcgctatcggtaaagaacacatccgtcgctgcacccaggttctgcagggcgccaccgttgtggcggtgtctgatatcaatgccgacaacgcccgtgcggcggtcgcgctgccgggcgtgcaggcggaagtctacgccgacggccacgacgtgattaacgccagcgatgtcgatgccatcctggtcacctcctgggacccgacccacgaagagtacaccctggccgccatcgccgccggtaagccggtgttctgcgaaaaaccgctggcgatgaccgcggaaggctgccgccgcatcgtcgatgccgaaatgaaggccggccgtcgcctggtgcaggttggttttatgcgcccgtacgacgaaggctatctggcgctgaaaaaagtgatcgacgatggcgatatcggcgcgccgctgatgctgcgctgcgcccaccgcaaccagtcggtcggcgagaactacaccaccgatatggcgatcaccaacaccctgatccacgagctggacgtgctgcgctggctgctgaacgatgactaccgttccgtgcaggtgcgcttcccgcgctccacctcgcacacccatgcgcgcctgaaagatccgcagatcgtctcctttgaaaccaaaaaaggcaccctgatcgacgtcgaagtgttcgtgaactgccagtacgggtatgacatccagtgcgaagtggtcggcgaaaccgggattgcccgtctgccggagccgtcggccgtccagatgcgcaagtccgccagcctgtcgaccgccattctcaccgactggaaagaccgctttatcaaagcctacgacgtcgagctgcaggcctttatcaacgacgtcaaagccggccagctgcacggcccgtcggcctgggacggctacgcggcgtcggtggcggcggacgcctgcattaaagcgcagggaaccagcgagccggttgaggtgacgctgcctgagtgcccggcattctacaaacgttaagcgcgttttgctgacggaacttctttgcacaggtaacgacgatgaaaattgcctttgatgtggatgtcattaaggacctcgggatcacccgcatggtccatcaggtagcggagtggggctacaagtacattgaacagtcgccgcacccgcagattaacccgttctacaagcacccgcgcgccagccgggagatcatggcggagtacaagcaggcgctgcgcgataccggtcttgagctgtcgtcgtttatctgcgtctaccgctggtccggcccggacgaactgcgccgtcaggcggcggtgaaaaactggaaacggctggtggaaattgcggtggagatgggcgttcaggtgatcaacaccgagttctccggcgatccgaatcagcctgagatctgcgatgaaatgttctatcgctcaatggaagagctgttgccgatttttgagcgggaaggcatccgcgtggagatccaggcgcatccctgggatttctgcgaagagaacaatgaaaccgtcgatatcgtgaagtcgttccgcagcgataacgtgaagtacgtctacagcgtgccgcacacctttttttacgacaaaggcgtcggcgacgtggcgagcatgctgcgctatgccgggagcgatctctcccatgtcctgattgcggatacccgcaaccatacgaaacattgccgctatatcgttaacccgccgggcgtggatgccgtggtgcaccagcacgtaggcgtcggggaaggggatgtggatttcgacgcgctattccgcaccctgcgcgaaatgaaattcgccgagcagaccttcaaggtcggcggggcgccgattgtcgccacctcgctgtttggctacccggaaaaaatgaaataccaggcagtggaaacccgtgaacttattgaacgtgaattgctgcgccggtaaggcgcagcggcaggagccctactatgaacaaagataacgtcaaactggctatcgccccgatcggctggactaacgatgatatgccggagctcggcagcgaaaacaccttccagcagatcgtcagcgaaatggcgctggccggctttaccggtagcgaagtcggcagcaaatatccgcgcgacccggcggtcctcaagccgatgctggacatccgcggcattcagatctgcaacgcctggttcagcacctttttcgccaacggccagcgggaaaaaaccattgatgaattcgtcaatcacatgaacttccttcatgcgatgggggcgaaagtgattggctgctccgagcagagcggcagcatccaggggctggataaaccgatcctcggcgatgcgaagccgtgcttcagcgacgaagagtggcagcgggtggcggaaggctataacaccctcggccgcctggcggcggagaaggggatgcaggtctgtctgcatcaccacatgggcaccggcattcagaccaccgcggaaatcgacaaatttatgtcgctggtggacgagcgcgtcttcctgctgttcgacaccggccacgcctggtattccgaaggcggcgaagcgccgatgctggcgatcctcaaaaagtatctgccgcgcatcaaccacgttcacctgaaagacgtccgtccgccggtgatcgaccaggtgcgccgcgacggcctgtcgttcctcgacggcgtgaaaaaaggcaccttcaccgtcccgggcgacggggtgatcgatttccgtccggtgttcaagctgctggacgactttggctataaaggctggatggtagtggaagccgagcaggatcctgctctggccaatcctttcgaatacgccgtcaaagcgcgcaaatatattcgcgaaacggcagggatctaatcgttgtgacattttcaggccataccgggtatggcctgcttttttcctttcacaaccggacccagggcttaaccacagcgccggacagttccctctccctcagggagagggccagggtgaggatggcgatgacgggtaaagcgtcacttcacttccgccagcgcggtcttatccacatacggtttcatcagcgcgtcggcttccttctgcgccgcctgcaccgccgcttccggcgtcactttggcatcgttaaccaccgccgccagctggttctccatcgccttacgcaccgccacggtctcccaggtggagtaccacggatgggcgtacttcagctgctcaagggcgatcgccgcccgcggatcctgctgcagataggccttcatctccggcgtatcgtatgacgccttgcgcggcgagaagtagccggtgaagcggctccacgcgccgttcacgtcggggctcaccagataggtcaggaactgatacgccgctttcttctgcgcatcgctgatgcctttaaaactcaccaggctggcgccgccgatcggcaccgcgcgctgctctttggccggcagcatcgccaccccaagctcaaaatctttgctgttctcgcgcataaagcccagcgcgccagtgctgagcatcgccatcccgagcttgccggagaagaacgcggcgctgatctgcttcgagttcaagaccccggacggcatcaccttgtccttgtagatcagatcctgccagaagcgcagagcgccgatggcggtcggcgagttgtaatagacctcgcccggatagtcttcgttaaagtatttcccgccgttggcgcgcaccagcgccgagaagatccagccgccgtagtcgtcgttagtcgacggcagcatgatcccccactggcctttgctctcgtcggtcagctttttggcatcggccagcagctcggcccaggtctgcggcggctgtttgatcccggcccgatcgagcatcgtcttgttgtagtagaggatcggcgtcgagttatggaacgggatcgcataggtggtgcccatcacctgggcgttcttatgcatcgcgggccagaattccttgtgcagaaaatcgccggccttttgatcgccatatctaaacagctcatccatcggcaggatctcatccttcagcgccagatcggtggtgaagttggcggacatgatcaccagcgccggcggctggccggccttctgcgccgattcggctttgatcttggttgtgtcgtagttgccggagaagatcccgcgtacttcgacatcctgctgtgagtcgttgaattgcttaatgacgcgggtcatctccatggtcagcttgccgtccaccggcgccgggaacatgaagtctattttctctttcgccagcgccgcgccgctcagggcgaggctgagcccaaccgcgactagcgtaaaaggtttaaacatgattacactccatcaacaaattatgctgggtctcagcatgaaaaagatgcacatcggcaggtgagaagccgaccagtagcgactcgcctttctccggcaccgtgccgcggtggcggcggctaaagcgcagggtgccgatcggggtgctgacgtggagcaggtaatcggcccccatcagttctcgttgcagaacggtggccggcaggcgcagatggccctcctccacgcggtcggtaatatgttccgggcgaacgcccagccagacgcgggtctgatcccggtggcgcggcggcagcggatggcgctgttctcccaacagtacttcaccgttggcgcagggcagcgacagcaggttcatcgccggcgaaccgataaacccggccacgaacaggttggccgggttggcgtacagatactccgggcgcccgacctgctgcacgtggccgccgttcatcaccacgatgcggtcggccatcgacatcgcctcggtctgatcgtgggtcacatagatggtgctggttttcagctgctggtggagcgccataatgctgtcgcgcacttcgctgcgcaggcgggcgtcgaggttggagagcggctcgtccatcaggaacagccgcggattgcgcacaatcgcccgggccatcgccactcgctggcgctggccgccggagagcttcgccggtttgcggtcgagcagcgcctccagctgcagcatctgcgccactttgtccacccgcggctgccagctgcttttctcttccttgcgcaccttcatgccgaaggtgatgttgtcgcgcaccgacagatgcggaaacagggcatagttctggaagatcatcgcgaagttgcgctcgcgcggcgtggtggcggtgatgttctcatcatgcagccagatttggccttcgctgaccggctccaggccggcgagcaggcgtagcagggtgcttttcccgcagcccgacgggccgaccagcaccacgaattcaccttcgtgaatatccagcgacagggcgctgagcgccggtttgccgtcgaaacgtttactgatgttttgcagactgagcatggcggttagcgctcttccgttgggcaactgatgttttcgtcgtacagccacggcccggcgtagtgggccagcgagtgctggtagctcacccactgctcaccgacctgacggtgcatcaggcacgaggccggagagaggtcgtaatagggccgggtgtcttcgtggcagtacggcacctgatgaacggtgccgggaatggtggagatcagcgcctggcgatactgggtcatggtcaggctgtggttatggccgcagaagatgcgcgtcagcgacgggaaacgctccaccagcgccagcagacggtggccgttttcgcaggcgatcgggtccatctgcgcattgcccagcggcagcggcgggtggtgcataaagatcgttgccggtttgtcgccgccctcgaacagctgggcctccagccagccgatggtctcgtcggtcagccagccttttgacgtgccggcgcggctggagtcaataaacagcaggcgggtggcgaagtcatccaccgcatagcgcatattttgcggatcgttgcccagctgcgggcacagcgggtgaagatgctcgagaaaatgggctttgtcgtcgtggttgccggggatcagatacagcggatagttcaggctgccgaggatctggcgggccacctgatactcctccgggcggccgcagttgacgatatccccgctcaccaccaccgcgtccgggcgctcgcgcagcgcgttaagctgggagaccacgtcggcgttggcggcattgacgtcgataaagccgtacagcttctcgccgcggctgcggaaatgggtatcggaaatgtgcgctaacagcatgaatcactccttatttgatcccggagaagccgaagctccgcaggaactgtttctgaaaaaggatgaacgccagcatcagcggcaggcagaccatcagcgtcccggcgccgatggtgccccactggccgccggattcggcgcccatggcgaaggagaccagcccgacggtcagcacctgcttatcgggatcgttgagcatcatcagcggccacaggtactcgttccagtggtaggtaatgctgacggtggcgaaggccagcaccgacggccaggacatcggcagcagcacgcggaacagcacctgccaccagcggcagccctccatcagcgccgcctcttccagctctttcggaatggcgaggaacgcctgacgcatcaggaacacgccgaacgccgaggtgaagtagggcatcatcaccccggtgagggtgttgagcaggccgaaggttttcagggtcagcatgtttggcaccatcatcaccaccggcatgatcatcagctgcaccaggaacaggagaaacagcgtctgcttgccgcgaaactcgtggcaggcgaagacgtacccggcggtggtgatggtcaacagctgcacgaagaaggtgccaaaggtgaagataagggtgtttgcgtacaggctcagccagtcggcgctctgccaggcgtcgcggaagttatcgagagtcagcggcaggcgcggcagcagcgacgccatatcgtcgccgaaggtggtagcgctgaacgaggtcgccagcatccagataaacgggctgacccacagcagcgccaggcagcacattaatactgtgagcgtaaagggcgacgagcggcgcaggcgcagccacagcggacgggcggcggcgggcgtgcggaccagcagcggcgagatttcagcgctcatagtgggctcctttctccagcagtttcaggttaatcagcgagaaggcgaacagcccggccagggtgaggaaggtggcggcggaggctttgccgaggtcgtgggtatcccaggcgagattctggatgtaatagagcagcacggtggtggcgttgtccggcccgccgcgggtcatcaccgccacgtggtcgatctgggtgatggagtagatcagcgcggtggtgatcacaaagctcagggtcgggcgcagcagcggtagcgtgaccttaaaaaagacctgcgtgcgggtagccccctccatcagcgccgcttcccgcgtcgaggccggaatgctctgcagcccggcgaggaaaaacagcatgtagtagccggcgaacttccacacgccgatcagcgccagggccagcagcgcgctattgctgcgccccagccagttgttgttcattgggccaaacagcttcgccagatagtggtcgagcaggccgaggccgggcataaagataaacagccacagcgcggcggcgctgaccatcgggataatcatcgggaagaaaaaggcggtgcgcagccagcggttgacgcgatggttctcgctcagggcgaccgccagcagcagggcgagggtcaccccgggcaccaccgtcagcaggatatagagcagattattgaccagcgactgccagaaaacgccgtcggcaaacaggcgggcgaagttatccagcccgacgtactgcgcgccgtcgctggccatgcgggtatcaaacaggctgtcatacaccgaacgccccagcgggaaccaggtaaacagcagtaaaaacagcagggaaggcgacaggatcagccagggaagccaggtctttctcatggtgacgcgcatctcgttcagccatttatcgaagcccggattgtgggaagcaatgactacagaggcatggcggggagatgacggtttgatgaagcgacggggaaaacgccgggcgagcgggccgcccggcgggagagaaccatcagaagtcggctttcagcaccgcgcggtagcgggctttgccttcacgaacgtgcttcagcgcttcgttaatttgcgacatcgggaacagctcggtggtcggagccactttgctgcgcccggcaaacttcatcagcgtgcgcagttcggacgggttaccggtcgccgagccggagatgctgcggtcgccgccgatcagggtaaaggccggtaccgggaacggcttcatcaccgcgccgacggtgtggaagttgccgccgtaagccagggcttcgaagtacggctgccagtcgaggtccaccgccacggtgttgatgatcaggtcgaactgaccggccagcgcttttaaggcttccggatcgcggctgttgaccacgcgatcggcgcccatcgccagcacttcctgctctttggccgggttggagctgaaggcggtcacttccgcgcccatcgcccgcagcagcttaatggcgatatggccgaggccgccgatgccgatcaccccgacgcggctggtggcggtcacgtggtgggtcagcagcggtttaaagacggtgatgccgccgcacagcatcgggccggcggacgccagatcgatgctctccggcagggggatcacccactgccagtcggcgcgcagcttattggcgaagccgccgcggttgagaatggtcggcaccgagccttccagacagttgatctggttgccgctgatgcaggcgtcgcaatggccgcagctgcgcgccgtccagccgatgccgaccttctggccaatcttcagccctttatcctgcgccgcgctgcccagcgccgccacccggccaatcacctcgtgaccggccaccagcggatagctcgacatcccccattcgttgtcgatcatcgacaggtccgaatggcagatcccgcagtattccacttcaacttcgacatcttccggctgcagctcaccggcatcgtattcccacagcgacagatcggcgcccgcttctttggcggcgtagcttttaatgatgctcatgttcatttccttggggttggcgtgataacccagaaagtgtagagcatggtattccccggcgcttggcaatcggaggggtagcgaagcgggcggaccagccgcccgttaaggtcagcggctggccagcggccactgattaaggcggatgccgcgctgcggggcgttctcggcaaaatcatccagcaccgcccgcacgtccgggtcgaggtagccgacgctgtcgtgctcgacgatcaccacgctcttttccggaatcttcgccagcagggctagcagatgcggattgtgcataaaggtcagattctgctggatgcgcagcacgtagtggtcatcgtagcgcgccagctgcagcgagtggcgatggctgcgccagaggctgaacgccatctgggtggcaagaccaatcccgatccccgccagcatgccgcaggcgataatcccgccgatggtggcgaggaacgggacgtactgcgccgccccctggcggaactgctcgatgaacagccgcggggtcgccagcttatagccggtatacagcagcacggcggcgaggctggcgagcgggattaaggttagcaggccgctgaaccacaggccgcagattaacagcaggaggccgtggataaagatcgacagtttgctctgcgcgccattgctgacgttcaccgagctgcggacgatcaccgcggtgatcggcatcgcccccagcacaccggagagcaggttgccgacgccctgggcgaccatttcacggttcggcgaaggcggcggattttgcgggcgcagctttttcagcgcctcctggctgagcagggtttcgaggctggcgaccagcgccagggtcaccgccaccacccacaccgacggattgcgccacgcgctccacgccggagattccagctcgcccagcaggtcgccgaggctgccgaacgccggcagggtaatacgcggcagagcggccagctgctgcggcgcaaaatgggtcagcagcagggtggtcacgcagccgagcaggacggcgatcagcggcccggggatccagcgcaggctcttcacccggcggataagcggcgagccccacagccagagcacgagcaggccgcccgcggcgacggcaaacgcagtgacggagacagcggcattgccctgaaccacttcggcaagtccggtctcttccgccgtgccgagcgcgacggggatctgctgcataatcagcaggatgccgatcgccgccagcatgcctttgatgacgctggcgggaaccagcgagataaagcgcccggcccgcagaatgccgaacagcagctgcagcacgccggccagcaccagcgccatcaggaagagggagaaggaacccagggattcaatagcggcgacgacgatggtgaccagtccggcggcggggccgctgacggcgaagcgggaggggctgagggtggtgacgaccaggccgccgatgatgccggtcagcaggccgacgaagggcggtaagccgctggcctgggcgatgccgaggcacagcggcagggcgacaaggaagacgacgatgccggcgagagagtcctgacgaagcgtgttcatggggcgtgctcctgcggtgagaggtgttcgacgagggtggttaaatggccggaagccagatcgtagacgcagccgtgcaggctgagcggtagcccgctggcgagcaccgtctgcaccggttcactctccagcagacgggcgaactgggcgcgaacgttggcttccaccagggcgtccagcgcatggcgagaacgctccgcgttggcgctggcgctggtgctggcgccgggggaggccgcaatacaacagtcatcggcgatctgcacaatttcgtgatgcagggtgtggcgcagctggccgatgcgacgagccagcgccgaggactcctgcgccagcggcagggtgggcagagagagcgccgcctgtacgccgccgcagccgtagtggccgcagagcaccacccgctccacctcaaggtagtggagggcatactgcaggacgctcatgacgttgtcgtcggcagggtcgagcatgttggcgatattgcggtggacaaagagctcgccgggctggctgccggtgagcacctcggcgggcacgcggctgtcggagcagccgatccacagcgagtggggccgctgcccgtcgatccatttttcgaaatagtccggatcatgctgacacttctgcagcgcccagctgcggttgcgggccagcaaaggttttaacgtcgtcacaagtattctcctgagttaattcatcgagtgaatatgtccatcaagactcgtacagcgactagtaaaaatagtgtttaccggaacccttcacgcctgaggaaaatcctggaataaacggcaaaaagaaaacttttcattaatgtaaagttataaaaatattgatgaaattaatgtttgtcttcggggtagatgaataacaaaaaagcattggctaaaactttctggaatatattggagtggtggtgggtggggttgggagaatagttggggagtggatattgaggatgggtggggaacgttgggttgtgctgaggatgcgggtgagagtgggatgagaacaagttgagataagattgagtgaggtttggggggatcaaggggaaaggggagtggctggcaggtggagttggggttgtgggggttgtgagaggagggttgctggtggcagtcgcgctgtggaacggcagcaaaaggtgacgctgcgcaggatagcgctgtttttttcaacacttagcgcaatgacgacacgctgtcgcttgcatgaccgccgccgacaggtataatccagaacgtttccgcatccccttcagtgccgaagtggcgaaatcggtagacgcagttgattcaaaatcaaccgtagaaatacgtgccggttcgagtccggccttcggcaccaagtgatgcaataattagctacctaagggtggctttttttgtgtccattttcgtccaaattcgtccatatccgtctgtaattcaaagataatttatttttcgataataactatttttattttgtggtctttccgtgttggtcatttttcatccattgacatccacgcgatttgggggccaaattgggggcttagacgtagttcgataatagtgaggcccccaaatggcactaacagatcgcgctatagtccacgccaagccttgtggcaagccgtataagctcagtgactcgcatggactttacctgctggttaaccctaacggttcaaaacgctggtacatcaagtaccgctttgtaaacaaagagaaaaagctcgctttaggaccttatccgcttttgacgcttgcacaggcaagacgcatgcgtgaagaggcccaattactgctgatttctggcatcgatccgagcgcacaccgaaaggctgaacgccttgcgataacgccggaacatacgtttgagtctgtggcacgcgaatgggtcaccagtaacgtgaactggtcggcggaacataagaagcgggtgctgcgttatttcgagctctatgtgttccccacgaacggcagctgtgacatcacaaaaatgaaggtcaaagatctgctggtgcccatcaaggaggtggagaaagcgggcaaactggatgttgcttcccggcttcagcagcgcactgcctgcgtgatgcgctacgccgtccagaacggcattatcgatcataaccctgcatcagatttaaccggcgcggtttccacgcccaaagtacgtcaccaccctgcattagatttgaatcttatccctgatttcctggaaagagtcgacgactttaaaggacgtaagttgactcaactggcggtaaagctggcgctactgctattcatccgctccagcgaactgcgctttgcccgctgggatgaaattgacctgcgtaacgccatgtggaccattcccgccgagcgcgaaccgatccctggcgttaaatattcagcgcgtggggcgaagatgcactccccacacctggtcccattgtcacgtcaggccatcgaactgctgcacaaggtgcggcagcactgccgaccgggaactgaattggtgttccccggcgatcataactaccgcaaaccgatgagtgaaaacactatcaacaaagcgctgcgtgtgatgggctacgacacccagaaagatgtctgcggccacggttttcgcactatggcttgtagcgcgctggtggagtcaggcctgtggtcaagcgacgcggtagagcgccagatgagccatcaggagcgtaagcgcgtgcgggcggcgtatatccataaggcgcagcatctcgaagaacgtcgggagatgatgcagtggtgggcggattatctggatgcaaaccggttcaggcatgtggtgccgtatggctttaaaaagtcgccgggaggcacactcgaccatatgagcttccaggagcgtaatgaccggcagctagaggagctgaaagccagaatactggccgactcggaatggctgacaacgtctgagttatcggcaaaagcgggctttcgttccgccgatcctgatgctggtccgaaaggctggaaagcggctgggaagatattctcgctgaaggtcgacggggaggatttgtatccggattatgttctggatgagaaagcgcggcctctcaaggttgtcaggttgatactctcgctgttcaaggaacgcaaaacgccgtggggactggctatctggtttggctcggctaatcgcaggttgagaggagggaagccgaaagatttgctgatttcaaagtcagagctggtactgctggcggcgcaggatgaggtggagtcaggggatgctggtatttagtcatccttggagtagggtttttcataacagagggaatcagtgcaaagcgacccagcatttatgtagacctgtggtttagcttagcactccccgtgggtagttaaatttgaccgtccgctaagagtgaggaatggaaatcgaagtgttggtacggatggtggattttggctgcttaaaacattgcagtgctggtgtagacacgacaaacataaaagtggatgcagttagaatagatatctgtgcagtaggtttctttgaggactagaacaatcaaaaagatttagataaaattgcagtgttaaattaattaactagtggtaattaagctttaaatgcgttagttgatttgtgtgactattgaaaattagcgctttttgaatgcttggagagtgaaatgttagaaccaccaaagagttataatgaaatgttacctatgctccataaggcaacttttattactacatttatattttatctgtcattggttatttatggctacatcccattggttggcattaatgccaagtacattccacccattaaagactacgaagagtttattaagtggatattaacattcggcatattaccaatcgcattttcaattttttggaccgtgattagtggagctttagatctacataataacgtggcaaaaatcattgggataagaaaggtatgggataattatttaattattaagccattggcgaagatagccggcgttacgagaaagttaagtggtgatgaatcctacaaggtaatgagtaaactttattatccagaagtaaaggagttgaaagataaacattatgttgagcttttttggaacaaagtatattacttttgggttttctttgaacatacagttattgcatttattactgttttgataatcagtttcgctaaattaactaatctattctctgttactggttctttaaataacctttggtcgtggtttattttccttgttgccttcaattttcttatttttatagcatcggttaagccaagaactgaaagtcaagtaagacagatacctgatgataaaataaaggaattctttaatagtaacaatattatttaaatggggttagttttgaattacaagataaatggaataattatacgttcagaaaatgctgccaaaccatatactatgccatctaattatctctgcaactatattgaaagctctattaaaagtggcagggcccttgattttggatgtgggaagcttaggtattcagaacaattggtaaataaatttgagactgtaacatttttggattccagaaaacaacttgaaagagtgcaaattatcaggggtgtacaaactacaatcccagagtatgtggctaataactataaaaatgctaatgctgttccttttgaaagtatagataaaataacgaaccattatgattttatactttgcgcaaacgtgctttctgcaattccatgtaaatccactatttacaaagttatcagtgcgattagagatttattaaagagtgatggggaggcaatgattgttaatcaatacaaaagctcttattttaagaagtatgagagtggaattaaacatttgcatggatatatataccaaaactctcgcaacgcttcctattatggtttgttggatgaaaatattgtaagtaaaatttgtttagataacaacttggtaataattaagtcatggagaaaagcaggcagttcatatgtggttgttggtaaaaataaacatatttagtatatctcaaaaaattcttttaaggtgacatttacttgttacttattagcttaagggttcgggtcaacatgacccgaacccttaagctattgccggtttacagacatttggccaaagcattgggggagttcagtacgaagcttttcttaatccaactagttatgctcgcttatgttagcaatttcttgtacatagctgcctattccaataggacttctatgagtgaagagcaacaataaatagcctccaaataaacattattcaatgaatcctgccaaccattatctgtaattaagtcactaattataaatcaacaatgtttagtgtcattccaatattatattgacttgaaatctcagatgaattttttgctattttagcttttaatttatcaatgctaatcatatcttcatagctgatataaaccatatcatcttggttaactttagatttgttcactatagcttgaataacagacagatcatccattacacctctcagaaatttaaccatgctttgatctttgaagtcagatatcgattttgaacgttgcttacgttggattgttccctttgtaattacttcattgatttcctttaaaccggtaagcatatcagataggctgccttcgcaactcatccggtgtttaattgcattgcgattaataacattgagaattatttcgagtgagtctttatcattccatgggtgtaatgacgtataatcctgatggcgttgaatagcatcgagcatatcatggatcatatcttcatctgctttatcgcaaagttcattcacgaaatagctgggatcgattattttacaataacttggaactgagttttttgatattttacaaaaaccaaaaatatataaagtagagtatttatctttgaggcttatacctaaatcatttgtcttttcaaaagctgtaatggtttttttaatttttgtcgggcttgcattcgtagtaacttgaactgctaccatgttttgattgtcagctaaatcaatggcgggaaagttaactttaatctgattcatgttctcaagctcacccatttttagtgcgcgaaacataaagatggtcaatgactcaatcattctttccatgtcatgaaagccagcctgtttgcgttgcgcgatataaagctgaagtagcgcgatgtctctctgtaagtttctaataagtgcgtcaatcatagctaataatccttttcaattaagttgggtggcttgtttatttgactgttagtttaatttcttgttgttatattaacacgcttcacaattcaatcaagatttctcaaaaattaatcccctcatgtaaactcactaactatgctgaatgcattccgtagttaaacatgtccacttctggcagagaaaggcctgaaggaaattgataactttgctatgagcaaggaacaacaaatctgtcttaaaaggaaggtcggccaacatacagttgacctgcgtaaagtagtttgttagataggaatggcattcaagcataaaaatattagatcacatagatgcgacgactggtgagacgtttcctgcatccgtccatatgtttataaaactgtttttatcgacatatagccagaacatgtccattctataaacatattttcgccatatgttaaaaatttttttatcaccatattgccggagcatgtcgatagagtttttgggggggcaatcacagttttctgcacagtgctgttaacgatattttttgggggtgatacagatgtacatggatacgacattgaagatatgaacatttaaaaaaatctatcccctatagaggatagatttgaaatatcccctaaagcggatatattcaaaatatctgtcatcggggataaaatgaacgtaacttcacccaaaatgctggctcaggcagtcagggaggcacgcaagcaacgtaagctgactcaacgcgaagctgctgaaagcatgagcatgaagcaatcaacggtttcagagtttgagaaccatccggaggggacacggctggacacgctttttaagctccttgccgctctggatcttgagcttcaggtcgtaagccggaagggtaaaaaaagtcatctgagggttgggaccaggagtggtaatccgtggaaaaattaacggttgcgcttaatggcatcattgctggtacgctggagaaaacggttggcggggaaatgtctttctactaccagagagactggctggaaagagccggttctcgtgccatttcactttcgatgccgttacgggaagagcgctatcgtggcaaaatcgtctataacttttttgataatcttctgccagatagcgagcaaattcgtagccggattaaggtacggttccatgtgcctacgaagcaacctttcgacttattagcacgtattgggatggactgtgttggggctatacagctttggccttatgaaaccaatattccatccgttcagagagtggatgccgaacccttaactgaaaacgaaatagaacatctgctgcagagatacaaagatgccccattgggtatgcaggcagaggtcgatgatttccgtatttcactggcgggcgcgcaggaaaaaacagcactgcagcgcgtattccgtagccatctcgtcagtagttgaaacagtaaaaaatgcccctatttcatggctaattaaccgctaaattctagccatggaggaaactaccgatgccaccccggacacaccgccagctcgtgagcgttgaagtgatgtggcctgctcagacgctaccgcttcccctgcaacatgtagacgaagcattgaatcagggcgaaacgcccgatcagattattatccgcatgaaccaacagggtctgctggcgtggcgcgaagacgcattcgagcaggatacacacgatgtttttcaggtgcggctggacaatcagcatgaggcgcggtttctctgccgctacgttactctgccgctgcactgatacccgtatcccggtactgcgagattgaagagtgctgtttatcaccggataaattaatatgctataaaataaagagttagcatatgtagtttcagggatgatgagttgtaaatgaagaagaaactgccagaccagctttccagggaatgcattattgcggctatgcgcgcctatgatgaaggtgtacgccaccagttcagcgagtcccggctgtatgatgtggtctttgaagggcgcagttatccaccgaaagctatagtcggtattgctgcttcaaatatgataggcgttgagttttcccctgaagattttagcggtggtatcaagtcgaaatgtgtcaagttgcttaccgatcaagggtttcagatcgttgagaaaaatttgggtaacgagcagcccgccatcactatttttcctgatgaactgccaccgcagagcgtatttactgaaggtgccgctatgcaggtaacggttaaccgctatgaacacgaccgtaaggcccggcaggccgcattagcctggcatggttgcctgtgcaaagtatgcggcattgatatgatgagggtgtatggtgagatagcaaaaggttttatccatatacaccacctgattccgctatcagacatcaaagataattactctctggatcccaaaaaagatcttattcccgtctgccctaattgccacgccatgttgcatcggcgtaatccgcctttttcgcctgaagaattgaaatcaattattgaatatcatgcggctctttaggtattacagcccattcgctgtggctcggtggaagagagtattttgatataaattgctattcgcgcagcaacttcagccacggattattcaccggcactttctcccccaacacctgcttcggatcttctatcagaaaccctttcaactgactacttttcttttgtggaacccgaacctcgcaggtccagataaaactgtcatcattacagcgcagggccagccctgactcctggaacattcgttgtgccagcttccagccgtcgccggtgtcgcccgtgatttctgctgcgtacatcttaaagatccccggcgttatcaaaaaaagatgattttccactacatgcaccttaccgttacgggtattcaccgtgcctgaagaactgatgtggttcttcagccacagcaggaagttgttaatgtcaccaagcttgggatcgtctgttatatccggcagcggttgagtgggtgtgctaagttcagggacgagttccgctccgtttaccggcgtcacatcaccgccaaaacaggcggggcgttgttctccctgttcccagattgcagatggtgtcaggcgcagcagcgtcagcggctcaacgggcgaccatcccttatctgaacggatgatgcagcgccagatcgctttatcctcgttagcgacaataagctgatgcgtcagcagttcgtcaaacaagcggttattgttttccggcacactggatacgccatgctggagtagccaggcgcggacccggtcggcggtggttttgctgaccagccacagcgcatcctccgtcagccagccatcggatccgcattcgggattattgagccggtactcgttctgtaccagtgagcgtaaggcggtgagaagctgctgggggaaggaagagggcttttgcgccagcgcggttttgatatcgccgccgaggtatcgggcgacagaggctttatcggcctgctgcaccagttccgccagcgcgccagcccgttcgtagtgtccggtaagctgataaatcagggacgcaaaagccgtggggtatccggccagccagtccagtaatggcgagggtatcaactgattaatcagcattgcggtagccgccggatgcagatgatagtcgcgaccgtggctctggtactgccagcgataaggctgtgccagattaccctgccacgaatgccagcgggtgccatcacgttgatgaatctccatatccacggcgatttttcccgtatcgtgcagcaatgctgcgcagactaccgtgaccgtccatgcgctggcctgccgggcctgttcttccgcacccacttccggtggcagcagataaccctggcgcagccgaatggcgttgcaggcaacttccagcgaatgatccagtagcccgccgggaatggaatggtgatgactttgtgaggcgggtagcagctgtaccagtgctgcgaagcgattaatcgccgtgaggatccagctatcaaacagggtatccggcagcggggttagttgccgtaactggtgcaaacaggactggcgtaacggtgtcgccagtaatcgttctgcggattgtggcgcaaaccagccctccggcagcgtagcgtctggtgcaggtggctggctttgggatggtctttgtagccacttcagcataattcctcttttcgggcaggcccctttgcccttgtcgcccttcctttgcagtgtttccctttgggccttttgttagtagtatatttttgctgtcaacagggaataattaagtattgcttgtatatcaaccgggatatatgtccagatttaattctattcagcgttatttattaagtcatatgagggggcgaggatttagattgccttactaagatgattaattcaatggtaataataaaaaataaattaaatcaaggattgttgatatattataaataattttgtcttttatgaggttagtaattatattaactctaatttcaataatttcttgtggttagctatatctctttattgttttttatcaaaatcaaaataatcattcagattcttgtataattctttttcatctattggtaaaccattttctttatcatgatataggtgttctagatatagttttgcttggttttttcttaatgtgacaccatttctcccactactatctactgggcggaaatgcaggttggcacctaggttgtaaatatctagagactcacctgctgttgttttagcacctgctaagaaactatatccaacacaaaatggatccggttttataattgattcaccatacattaattcacaatcattaagtatgtcatgcatctttgcataatctttccatttcttgttctgaatataatctttccagctttcgaagttattttttatgttttcttttttgaagtataataaaagacacgcggaccgctgatcagttaaataacgagaggtcaattgtagaagtccttcgaatattttctggttattgtatccgattttggcttcaattagccatttgaatctatctttttctacaaaaatatcaacatgtcctctattcgatggttcacttttggtttgaaaaccagctttctcaataaggagtgaaatagtcgtactgatttgctcctccgactggtcataatacttatccgcattactctctatagatttgactgcatttcttaaagttataaaaacactgcgactgaactcatcaaatttttgagggtcaattaaatctaggaaatcatcaagaactcctgagcttagcattgagtcaaatacttcatcctttattatcattaatctatttcccaatctccatcgtcacctataatacttatacttgttgtaaaatagaatgaaagtctttctttgagaacagggcatataaaatgcccatctttttttaaacattcattgcgatggtataaataatgtttaaattcgactttagttagctctaattcttcattatcctctaaaatatacgaatatcgcggttctaatatttttaaagtctccccgcaaaaatatacggcaatatttaaacatttgttattgtcagtttttgttatacttttgattttagatagagggaaatattttatggaggggttgttttctataaaatagattaggcgaagcatctcctcctttagttctaactgcagaacaggatcatcacttattttcaacttcgcctgctctaagtgccccatcactcagtacctttctccactatagaaactaacgaaatggaatgtgacagccccttcggattatcgattataaaccgcttgcatacagtataattaaagtttgccattgactccaggctaatctgtgttttgattttaagtttgacctttggatcaatttcttcccaacggacagtaactgcaacacactcaacatcttctttttcagagcctgctaaatgatattcttgttcacgtaaacatacatcaacttctttacgacatgtacgaggaatagaaataccattatctttgctataaaaaacacaatcaacaactcggcctattgaactattattataaatagtgcttatagatttatttagatttattgagtttgaatctttaaggctaatgccattcttagataatatttcaacgaaagtatcttgtaagcgagccatttcattatctatatcgcgcttaccaatttctgtcgatattttaaattcaattctgttatgctctttaggaatgaatacagtatcaataaattgtttttttatatcttctctgtaagaaacttttcttaagacaccctgaaccttttcaagcttttcaacgcgctcactgactctacgaggggtagaaaagaagaaaattataccactcttcttatattcgatgtgtgtcaaaacagggagtgaggatacagttaaatcttctggacttacaaaaagtgggaagcactcggagtaaggtttaccatcgtatttaattttattagcgttagccactaagactgaatgttcatttgctgtaagtggaaaaatttcacagtaatgtttacctaagaacattaatgctttagtaatactgactaagttactatatgtagcacgttctgaggccttgcgttttcctgaaaattgttcaaggatatttgaacgagtctccttccagcctatgcctgtatcaaagtcaaaccttttaagatagtaacgcgaatagttagtatctgaaatggttccaataacttccagtaattgctcaattggtaaagatgaactggatacacacgactcaacctgagacataatcgactccactttttcttttaattaaattattgaaagatatggaagtcaataaaaagattgtaaattctatattatatttgtggattataataatgtatatttatacagcagcaggctggcgaaggcctggtccagccgacgattttttgcttcagcaggtgcgcgatcaggttcaggcggatgcgcagttgcttcagccagtgggcggcccacggatcgtcggcctcttcggcgcgcagcagacgcctgagtaacgccagacagagcagcatgccagtgggatgcgcctgccacagccgggcggcgatgcgggtgtgcagggtgatgcggatatcgctgaacagggttgtgccaggcatcggaaattctccatggattcagatgcccgcagtgtcggtccgcgcaatgagccaggcgacaggaaacccatctggcccgcagaaagttaatttcgccgatgaatgaggtttgattgatagctggtacaccggctttatgcggtgcgcataaaatcggggctatctgcgcctgcgccgaagctgattgaactcgccccgtctggccttctccagtgttgccataagataggcgagggggcggtggatatcgtgggcggcgatccgccacagacagtcgtccagcacctgctggcagagagcgggctccagattgcgcatggcgcgttcggcggcgcggcgctcgctggcgctgaagggattatccacaggccagtgcagcagttgcgtacgcttttgatgtttattgtttaaatctgtaccagtatgtacgcaatgcggctccggctgcccgccagcccccgccacatcactgagtcttaattgaagactcgggcattttttactgagtcctcgattaagaccaggggcggtcttcaatggagactcagtgcaggttcgtccactgtccacaggttgttgcagggtgagcagtaacccgatggcgatgttgcggatacgccggttgcggtgatgggagcaggccgtgagcagcgccagatattcgctgtccatcctacaggcatcggcatgggataaaggcgcatcatgcagggcgtagaggttaccggtgatcctgccgcttggctcgtcgcgcagccgctggcacaggctcagccagcgagtgatccgcagcatcatcagcgcgttgctgacggtactacgtgaggccttctcgccctcaggctggtcggagagccagccctggagttcgttgtatgacgggaagacgccgctgccgtcgtcgcgcgcgtgcaggcgcagcagttgccacgtgaacttgtcgcgcggggagaggttgcgcgccagcagcaggcgcttcggcacgctctgctgcgggttgccgagaaacagcagcctatcgtcactcttcatacagcagcttctcctgagtccactggcgcagcaggttccagatgaccgtcagcgacagatcgtgttcgcgggccatcgccatcatggcggtcagcgcttcgggtgagtcgagctttttcacgcccgttttctgccactcgttccacaccagcgtttccacctgctcatcgggagcattgttgcgcccttgccggacaaacaagccaatcagccgccgccgggcgcagacctccggcgtggaaaggccaaaatagtggttgatgaattcgatggacgcgcccagcgacagggcttcctccagacgctgctggaacagccgctcctgctccatcctcgccagcatccggcccagcatctcgtggtcaatgtggggggtgatgaactgcaccgcactgttgctgagaaacaggatgtcgtcggcggtaaggcgcgtcagctcgcacagctcctgcgggctgaagcccagcgattcgcagtagcggatctgtccatccttcagcgcctggacgatgtgggtgagcactgcctggttaactgagggcgtcatggcgaacctcccgcagccgccgctggcggcacaggctgataagctgcatcagttgctggatctgagcgttgtcgtagtccggcgacaacagcaattcgagggcgggcatcggcgtgctggtgtcgccattcagggcggccagcacctgatagcagcgccgtgccgccggatggggaaaatcgtggcaaggcgcgagggtgaaaccggccggagcgctgtcgtccggctggatacaggcatccagtccccagcaggcaaacagcgactgtgccgtatgcaccagcggtgagggctttggctcatcgggcgcggcgggttcagtcggtggctcaggctctggtagtggtgctttttccacttccggcggtggcggccagaggaccttttcgaccggaggccccagcagaacctgccgcttgctctgaccatcggtcagttccgccagcaatgtattccagcttatgccgctgcgacagctcatctcgccgagcagttcgtcctgcaccagttgcggtaccacagcttccggctcgccgttgaaggtggcgagggcggtgctgaacaggtcggcaaattccggctggcgttccagcggcatcagctttacccagacctgttccgccgcgctgcgtagtgccagcaggcgatcgataacctttcgggtaaggccgccgtatagcgcgttagggatgcagggcaacagccagtccacggtctgtagcatccggctgatttgcgactggctgacgggataaccgtcgcgggtcagttgctccgccagcgccagctgcgtcgggcattcaatacctgcctcgaggtaaagatcgcgcagatgcagaataccttccgcccgttcgataaacatcaatccgttatgcaggtcgctttccgccagatggccgatcaggcactggacttcgccttgctgcggtgacagcgtttccggccatggtctgaacggccagcagacgcggtggtaacgctcatcctgtgtctcctgccacagttcattgaggatggcgaggtgcgtattcctgccgctggcgagcatgtatttttcatcaccggggcgacgggtcaacaccggcgggttatccagcccacgggcgagaattgacgctttcagcgcatcatagccggggttgcgggtgacgcggggattgagagagaacggctggatttgctccaggctgacctggaccatttcctgttctccggtattgctggcaccgtgaagccagcggttgagcaggtgtgaagcacacataatcttcctccggcattcagacatcgcgggtaagtcggatgcgctggtggatccaggcatccacctcgctttccagccaggcgacgtggcggctgttgagtcggatggatggcggaaactgttgcagctggatttgccggtaaatccacgatttaccgaagccgattttgtcttccacctggcgtaagcgtaaaaatctgtcgctattcataaccattcctcctgtgtccagattcgttcacatcagcacgatgggcgtggttatcaaagcagcagcgtccctgccaggcagtaaaaatccttatctgggttagtgagagttgttagttgaaagggggagttgatcgcgttacggcggtgcgccgcgctggagtgcggttttcaacgtctcggggctcagcggcaggtgcataccttcctcacgcgcccagcattcgaaaatgttcagcagtttgtagggatgctccagcatttcgtcgtccagttgcgggttgtgcttgcaggccagccacagcaaacgggaaagcgcggaggtgatccgctcctttgattccggctgatggcgggtcaggaaggccttgagatgagtgcggcggatgacgaacagtgcgtcaggaggcaatgtatcctgcaggtagcagacggacagactgagccgggacttaaggtcattgcgaccattaccatataactggccaatcagcagatgtagttcttcctgaaggttgttttgcgtggcgagcagttccagtaaaagctcccgcaacgatttgcggcaacagagttggtagtaactgtcgttctcatcgcagaccacaatgccaatttgattgcagcaatgggtatctttgggacaagggcgattcaacgttttcgccagttgctggtggagcagcagacgctcaaggccgattaacggcaaattccacagatggctggtggtcagttgcagagtcgggtcgcgtctgcatggcggagagttcgccattatcttgcggttgccgggtttgttgcactgcgaaggcggaaagggaggcttgctgaatcggcaggcaaagcggcaaggaggattgagtggtctcagcagaacgggcgaagggaagtagaccgagagcgacagatcgccgtgcagggcatggcggatcaggtcggcgggcagcaacgtgatgttgtgctgccggatgacttctgcggcctcgtccagcgtcagccactcctggcggattttatgtggggacatggggcgtttctttttgtgttgttggttgcgtgtcgtgcttgttgatggcgaaaaccggtgtgcgatgtttttgctaaaacaactaacctgatcagtttagttaacgatcttttcagacataatctggtgatgaattacgctggaaaaacaggacgtaaaattgaatagctcggaagacgatttgcttgaagtggcgtggtatttgtcgaagtacggtaaatctcaaccacctgtgggattgggtgttctgaaatggaaagaggcttatgatttgttttatccccgtttcggggcgggcaaaaccgctagtgagtttcgcaatagtctgaaaaatagtcgtgaccgttttgattcctggcttagtgatgtgcgtgtcggctggcttgacgagcagggcgctcctgctgcgctttctcattcagcgcagcgtgtgcatcagcgattgagtgtgctttcagagagtgcaattgagcagcgcgttctctcgttaatatcttctgctggagatgaacaggcacaacgagactgtcttattattcagcaggataaaagtattgaagatactgtacgcgagcaacttattgcggcgcggctggggcagggtacctttcggaaaaattgtctcatgctgtatccggcatgccctgttacgggaacgacttttgcgccgttactgcgtgccagccatataaagccgtgggctgcctgcgagaatgggagtgaacgccttgatccttttaatggaattatactggccgcacatattgatattttattcgatcaggggtggatttcgtttgaaaacgatggacgtttattaattagtaatgagctggatattagttttaaagagcagtgtctgttgccggagaaaataaaggcgtttcctgttgaatcgtattgttatctggaatggcatcgggataatttgcttcgatgaaagtgaatgggacaaataaattactactcaatctaaaatatattttgagagtatctgaaattgagtaatgttcttttagcgatcctctgggggaagtttacgtcaacgctcactttgacgaactagtttgcgtggttcgacgttgaggtgcttgttaaaaaatcggtggtttaatctgtcgagtcgggtctaaccttctcaagaggagctgcgactctccttgtaggctgtttttatgaatgcacaagcgtttacctaacttacggttcatgagatcatacctgccacagtgaaaccatggggctctttgctagaatttgttggattattgttaaactttttgagctaggctttaccgacaaaagaggaatagttagcttctttttcatttaaaatattgtattttatggtttttattgatgtttattcattgggccccctgaagaacgagatgattgtcagatgaaaaaagtatcttgtgttgatttattttgtggtgcaggtgggttaacacatggtcttgtgcttgaaggagtacctgttgtcgcaggtattgatattgatcctgcctgcaagtttccctatgagactaataataaagcaaaatttattgagaaaagcgtaagcgattttacatcttcagacttgaatgagctctacgctgattcagatgtaaggattcttgctggctgcgcaccttgccaaccgttctcaagctatgcaaggcgttatgagcatggtggtaaggatggtaagtgggggctgttgtacgagttttctcgcttggctgaggaaacgcgccctgatctgatcactatggagaatgtaccttccgttgcaagacatgaagttttcagcgactttgtcgataccttaaaacgtattggctatcacgtttggtttaatgtcgttgattgcactcactatgacgtcccccagatgcgtaagcgcatggtactgcttgcttctttacacggtgagataaaactcgccgagtcaacgtgtactcagccaattacagttagacaagccataagcgatctgccagctttaaaagcaggcgaaactagttctggggataagctacatgtgacttcaacgttgtcggaaaaaaatctgcaacgtattaaagcttcaaaacccggtggaacgtggcgtgattggcctgaacatttagttgctgattgccatcgtacagataaaggaaaaacatactctagtgtctatggtcgaatggaatgggataaacctgctccgactatgactactcagtgttatggtttcgggaatggccgctttggtcacccagagcaagatcgtgcaatctcattgagagaagctgctattcttcagagttttccgcaggactacgtatttatccccgatgatagcaatgtcaatcttagagttctgggccgaatgattggaaatgcagttccggtaaagctgggtcaggcaatcgctcgcagtataaattcacaccttgacgatttgaacttggtcgcaacaaagtgaaactttaaccagcctctgggcgtactgaaccggaatctgaacattttatggatatttcgaatcaaaaaaatcatcctcaacaaattattccagagccagggcaacttgttgaagttcgtcgacgccaatggatcgttgttgaggtttcatcttcccagttaccaccgccttcgtctcagcagcatctcataactctttcatccatagatgaagatggtttaggagaactacttgaagttatctgggaaattgaacctggcgctcaagtaattgaacgagctggtttaccttcgattactggcctggatgactctgacactcttgaggcttttcttgatgcagtgcgttggggagctgtcactaaagctgaccatcgtaacttcttacaagcaccttttcgtagtggcgtaagcattgaagacttccagcttgatccgttggtgcgtgcaattgatatggctcgtgtcaacctgcttatcgccgatgatgttggacttggtaagaccattgaagctgggctaatcatccaggaaatgttacttcggcatcgagctcgcacagttttgattgtttgccctgcgtcgctgcaagagaagtggcgtgttgagatgttagaaaaattcggtcttgaatttcaaatcgtcgacaccgcttatattaagcgattaagacgagaacgtggcattcatgccaatccatggacatcgcatccacggttaatcacttcaatggattgggccaaaagtggggaaggtttgcgttccatgcgtgacgtcctccccttaaagcctagttatccaagaaagtttgacatgctcgtcattgatgaggcgcacaatatagctccagtgggtagagctaactatgcaatggaaagccagcgtactaggtttattcgttcgataagcccacacttccaacaccgtttgtttttgacagcgactccgcataatggctataccgagtctttcacttcgttgcttgagttgctggatgatcaacgttttgccagaaatgtacttccagatgagaagttgttgaatcaggtgatgatacgtcgcctcaaaagtgatctggtcgattcagagggcaatccactttacgctcaacgtaagctcaaagccttatccgtcgaatattcggttcaagagcgttctatccacaaaaaattggatgaatattgccatagccgggagcaaggagcagagaaagccagcaatacttttgggacgacctttgtcaaccagctccttaaaaaaagacttttttcatcaccagcagcctttgcatctactcttgaaaggcacatatcaactttgacgcatggcaaacggcctaatgataaaaatgccatggctgatcgtatccttcataaagcaatccttcgtctagaagaagattacgctgacgatgaagagatagagaatgcccaatctgaagcggtggaagaagcaacacattacacccaaccgctgacgaatgaacagaaacaaatacttgatgtattgcgtcaatgggcgcaagtagctaagaatcaggtagactctaaagctagggcaatacttgattggattaatacgaatcttaaaacaaataatcagtggaatgagtaccgggtaattctgtttactgaatatcgaacgacacatcaatggatgcatgagattctggccagccacggacttgctggtgagcgcttagctgttttacatggcagcatgccgcaagaagaacgagaaaaagttaaagccgctttccagacatcaccaaaggcttctgctgttcgcatactcctcgcaactgatgccgcctcagaaggtatcgacttgcaaaactattgtaactaccttatccatttagaaattccatataaccccaatgtaatggaacaacgtaatggtcgtatagaccgccacggacaacgccaaaaagaagttgtaatttggcacccggttgatggtgtggataaggtgaatactcgtatcggcggtcacggtgacgatatcctacgagcattacgcaaacttgaatcaatgcgggctgacatgggtagtgtcaatccagtcatcgcacctcaaatgtcaggactgattgaaggcactatcaaagattttgatacacgtctggctgaagccagaattgcaaagacgaaacgttttattagtgttgagcgcgaactaaaagagagaattgcgaagctacatgatcgactcctttcagccagacaggagcttcatctcacacctgagcatatacaaatagccgtcaatacagctctcatgttagctggtcgtacaactcttgaaccttttgaattacacgatgctccctcaggttctgtattcaggatacctgctctctcaggtacatgggcacgttgtcttgaagggcttcgtcatccccatacacaggagattcgtcctgtcacttttgatcacagtgtggcgaaaggacgtgatgatgtcgtactcgtccatttaaatcacctgttagtgcagatgtgtctacgtctattacgagcagaaatatgggcgcgcgatgatataaaaaaattacatcgagttacggtgcgctcagtaccagacatgttacttgaaagccctgcggtcgctgttgtttcacgattggtgattactgggggtaatcaccatcgacttcatgaagaattgacaatagctggtggctatcttggcgacaaaagctttaggcgcgaggatggtgttaacaaactacagcaatggtttgagcaggcgaaacctctgactactgaattttcgcttttggatgcctttcgcatgcgttttgaacgtgcaaaaaacagtattcttcagtctgttgaagctagatcaaaagatcgcctgcaatatctgactaatacccttcagacccgtaaagagcgtgaattgtctgatatcaataacatactcaatgaacttgaaattactatcaaaactgagttagctaaagatcaacaacctatgcagttttcattgttttcagaagatgaacgcgctcaagtcaagcgtgataatgcagcgctggaagcccgcctcgctcgcattcccgctgagcgtgaacaggaagtacaaacaattgaacttcgctataccaacattgatgatcgcacattccctgtcgccgtcatttttctcgtcccagaatctactattcaaggaggcgcagcatgagtttaactaacaatcacgctgaatggctttctctggtagatatttcgggaccttttctcgctatcccggtactaacgcatacatttcctcagggactagaggagcttagtagcttcaagcgtagacggctgcgtcaagcctatgacgaatggcgggaggcattagaactggaagatcctcagctagaagatttgcactctgcatggatagacgaagtgctgtcacgagtgttggaatttgatgatgatggtaaaggtgatgtgctgaaacgtgaagagtggtgtagaagccacttgaaatcagtattgccagatcagggagtggttgaatatcccgatttggcagttgttgatgaacagcaagataacaagccattgttactcatacatacctataaaccaaatgtagaactagaatcaacagtaaaacatgagggatggataaccaccccggcagatcgtatggttcagttatgtcgttcacttggttgccgtctcggattgctaaccaacggcgaatgctggatgttagtagatgcaccagtgggtgctgtcacttctttctccagttggtatgcgcgtctttggagtttggaaccaatcacactgcaagcgtttgttcatttacttggcattcgccgcttcttcgttgatgaaactgaacagttacctgcattgtttgatgcttcattggagtatcaagatgatgtaactgatgctttaggtgaacaagtttgccgtgctgtagaagtgttaattcaatcgctggacaaagccgatcaggatcgcaatcgtgaattgctgtgcgatgtcagtgaatcagagctttatgaagccgcgttaacagtgatgatgcgtttggtatttttgctctcagctgaagaaagggggctgctgctcttaggtgacgaatgttatgagtctaattacgcgatttccactttgcgtatgcaactacggcaagaaccttcagaaatcctggaaaggcgttgggatgcctggacacgattgctggcaacctttcgtgcggtttattgcggtattgagcatgagaatcttcgtttacctgcattaggaagttcattgtttgatcccgaccatttcccttttctcgaaggaagggctaaagaatccaactggaaaaacgatacagctgtacctttaccaattgataatcgaacagtcctcctattactggaagctattcaggtttttcaggggagaactctttcttaccgcgcattagatgttgagcagattggttatgtttatgaaggtttgctggaacgcactgtcagacgtgcagatgaagttacgttagagctgaatgcgaccagaaaagctcaatctccttggattaccttagctgaactggattcagtctgtatggatggtactgaacagctgatcaagttactacatgaacgctctggtagttcgaccagtaaggtacgcaatgatctttctaaaacaattgatgaagatctgattgaacgcctcttgattacctgtcagggtgatatcaagttgcgtgatcgaatcaaaccttatgtccatttgcttcgtacagatccttggggttatccattagtttatccagccggtgcatttatggttattggcagttccaataggcgcgaaacaggtactcattacactcccaagtcgctaactgaagctatcgtggcggagacattgacacccttaacctacttcggccctgtggaaggttctgcatgtaaagaatggactctcaaaactcctgcggaactacttgatctcaagatctgtgatccagctatggggtctggagcctttttagtacaggcttgtcgttggttagccgatcgtctcgtcgaggcttgggctcaagccgaaataaagggaaagattataaatgtagatggaaacgttcttgacgatttgagttccaacgagttaatgccacatgatattgatgcaaggataaatattgcccggtatctgatagcggagcgatgtttatatggcattgatttgaacccacttgcggtcgaactagccaaactctcaatctggttagtgactctcgccaaaggtcgcccatttggtttcctcgatcatagtctacgttgtggagatagtttacttggaattcatcaagtaaatcagctgatagaattatctgttttaactaacagtgatgaccaagatacattatttagcaaagatatccgtaaagctatttacgacgcgagtaaattgcgtcagcgattacgtgagatgcctataggtgacatccacgatatagaggaaatggagcgcttgaatacggaggcgcataagcggctttataaagcaaaaaaaattgctgatgcgcttgtcggtgagatttttgccacaggagctaatttttcagcgcgagaagcaaggctcaagatgttgtccttgaagttaaaagagtccgttgaagaagatgaaaatatctttatggaaatctcttatcaaggaactgtaaaattacaacaagaacttccatcaggcagaagtaaacggataccaattcattggcctttagagtttcctgaagtatttatacgaacttgttcagggtttgatgcgataataggaaacccaccattcttgggagggcggaaaattactggcgtattcggtaatctatatagagaatatctggttgctaatattgcaaagggggaacgcggttcttccgctgatctagttgcatacttctttttgcgttcattctatttacttcgagagtcagggtgcctaggcttaattgcagtaaattctattgctgaaggtgattctcgtcaaattggtttggaacgacttcttcaatctggcgcccaaatattttctgcaaccccaaacgaaccttggcctggaaaagcagctgtagttaccagtagaattcatcttattaaaggtgcattttttggagaaaaactacttaatgggaaaaaagtcgctataatttctgcatttttatcagatcaaaatgaatggagccctaagatcttgaaggaaaatttaggtcaatcatttcaaggaacgattgttttggggatgggatttatacttgatgaaaccaatgccatgcaaatgctggactctgataagtctaattcagaagttatttttccatatatcaatggagatgatctaaattccaatccaacacacaagccaagtaggtgggtaatcaatttttgggattggccagaagagagggctaaaaattttaaatttccttatgcatgggttgagaataaggttaagccggagcgacagcgcctcaaacttgatggaacctatgcattgagaaaaccattacctatacgttggtggcaatatgccgataaacgtcctgcactttaccatgctataggtaaaggtgatttttttgaacgtcatccaaaaaattggtccactgaatcaagggtgttagagaacattatcgctatatcaagacatacaaagttctttaacccggttttgattcctaatacagctattttatctgatgcaactgtagttcttgcctttgacagttttgcttatttggcttggcttaattcttccttggtacaggtctgggttcagaaattagcttcatttataggtctcactattcgcttcactcctagcgattgtttcgatacattgccaaagccgaataacatcaacaatgtagagcttattacactcggtaaagaataccatcagtatagaaaaaaattaatggttaatcgcgacattgggcttactcagttgtataatttatttcatgatcctaatgaacgagattcagaactaaatattctacgtgagaaacaactggaaattgatgttgctattctcaatatctatgggtgggatgatataaatctgagtcatgacttctataatgtagcttacctacctgaaaatgataacaagcgtttcactatctccgagcctgcacgtatcgaggtattgcgacgtttagccgaactgaatcgggagcgatatcaggatgaagtcaatcaagatttacatgcccgtaaatctactagatcatgattaaatgcgccgtgattgggaagtgttaaatttttatacatttatgaaacgatgccaacaaaaatccagtgtgctttgaggaaaaatgatgactaatagcccctattccaattcaagcaacgcatggtttgctattgatcgtgacggagataaggattcccacttagccctctatacattgcaactaaaaggtgatcgtgcactcagccaagctgttgtcaacaatgattgggtagtagtcttggatactaaaggccatatcacgcgagttggccgcattctgcgcattcgctctgatctcgaaactactacgctctatttcgatcgtatgtttcgggttgtatcgcctgtttccattggttcgacctcacttacactacctgcaaaaggaagttatggccggcttcagtggaaagaattcattgaaatgctaccaaattcactaaatacaagcattgctgaaataccaacgatcgaagatcaaacttacattcgcgaattactgcaactagcagttatggatgatttactcgggccggcagccggccctaatgagcttatcgtcgatatgggcgtaagggatcgctatcttgttggtaagcttgctccacgtgaagccgccgagcgcagttctgagttttctgtggatccagagaatgctgatgatgatgttggtgaccaaatagttaagtctcagacaacaaaagtgcattctccaaaagtgtctggccggggagaacctgatgtcccggaagaaattgatgctgccagcaaccaatcattggtaccaagtagtctgggaatgactttttgtgtcgatggcgatattgatcaaatagaactagaagctcgttggggacgttatgagcgtagcaatgaccatgagatttaccgaatccgcaagaacaaggaaacaggagtcgaagaacagaccaaagtaaaagtctggcagcgtttccctagtggcgggaagattacattatctctgatagaaggcacgattcctcctcaagttgtagatagtacatgcccagaagttttggtacagggcacaattcgtcacaagaatgaaaatggggatcgcctggtcaccatattccttgtaaacaatcaggacgatccaccttctaatcatgatatggcatggattttccaaccagaattgatcgttagaccagtaaaggatgctgttgagaaggcgatattcaggcgaaaacccgttttgggttctgacggtatggatcccgaacgtgaagcgctggaaatgatttatcgtaaccatgttgaatttgcagtagggcatggtgttgcagtgcatgctaaacctgcagataacactgaacttgcgactgaaattcgtacgactgttatgccacagtatgaagtccagagaacagaaactcccggtcttgatccatcggatcgtccggcgatgcaagaaatggtcaaaagtggtttacttgacatgcagaaactggccactttggaggtggaaccactgatcgatgcattaaatgtactaaccaaggactatctggattggattagtgaacaacgtgccagtgcaggtattaaaattataggttttgaaacccaatctcagatagcaatggatcgttgtaaggagatccattctcgcctgcaaaagggtattgatacacttaagcttaatgaaaaagcgctggcagcatttcgtttcgccaacaaagcaatggcaacgcagcgagtacgaagtttatacgcgttggctaaacgccgtggtgaagatacgactatcgaatcatttgatattgaaaagaatcgtagctggcgtccttttcagttggcattcttgttgctctctataccttcgttggcaaacccaaaccattccgatcgcgtgcagcctgtaaatgcatatgctgatcttttatggttccccacgggtggtggtaaaactgaagcttatttaggcgttgcggcttttacaatggccatacgccgcatgcagggtaatttgggggggtatgatagttcgcgcggcttggcggtaataatgcgatacacattgcgcctgctaacattacaacaattccagcgtgcgacagccttaatttgtgctatggaagttttgcggcgagaagcactcaataatggcgacatgtctctcggattagaaccatttactattggtctttgggttggcaacaaagtaacgccaggttcgactgaagagagtcatcgagctattgaagatgcccgtaatccgggaaaaaaccatgcgggaacggcctcacctgcacaattaactagttgtccatggtgtggttcatcaattatccccggacaggatgttgaagttaaaaaggataaattggggggaaggacgtttgttttttgcggtgataaaaaggggcgttgtgacttttccaaaggaaaatcaagtaaacaagcccatccaggattgcctgtattagtagtggatgaagagatctatcatcgccctcccacaatgatgattgctactgtagataagtttgccatgatggcatggcgtggccaggtgagaacgcttttcggccgtgtaggattggaatgtgaacgacatggtttgctctggcagggggctagctgcacaggaaatcatcccgcagccaaaggacaaccttcaactaaagttaaggttatcaatccaatacgaccaccggaccttatcattcaggatgaattccacttaattagtggtcctttgggcactatggttggattgtatgagactgctgttgatgaattatgtagttggaatcttgacgggaagtcggtcagaccaaagatcattgcttcaactgcaacagtccgtaaagctaaggaacaggtaaataatgtttttatgcgccaagtggcagtatttccaccacatgggatagacgttgaggataactttttctcagtacaacgacctataaaagaaaagtatggacgtcgttatcttggggtatgctcgcctggcagttcaaggcccgcaatgctgatccgtgtttacactgcattcctgaccgcagcacaggaattattcaaccactttggcgagcctgctgacccttatatgacaatggttggctatttcaactcgctacgcgaattaggcgggatgaagcgacttgcagaggatgacgtacaaacacgttcttaccgggtgcgaatgagcatggtggaaagaccggcattggcacaacgtagtataagtaatattcgtgaattaacttcccgagtatccagtcaggatatccctaaatatcttgataatttagaggttaagtttaaatctgaatttgatactactactggtaagtatgtgactaaatggcaggagggggatactcgggctatagatatcgtccttgctactaatatgttgtctgtcggcgtcgatgttaaccgacttggtcttatggcagtaaatggtcagcctaaaggaacggccgaatatatccaggctaccagtcgtgtagggcgttcatttcctggtttagtttgtaccgtactaacttgggctcgtccaagagacctttctcattacgaaacattcgaacattaccatgccaccttctacaagcatgtagaggcccaatctgttactcctttttctcctcgagcgatggaccgtggtttaacaggtgcgttattaagtcttgttcgtctggaaaacgacgaattcagtcctaacgatggggctggtaagttgaatatgtctaatcaagccgagatcagtaatgcgattaaagcactggcgaatcgcgctggcaatgttgcagaagataattctcgcaaaaaattggcagagaatgaactgaaagaacgtgccgacgaatgggcaaaaaaagcgtcaatgggcggacggattcttgcatatgaaaagcgcgggcctgaaaaagataagactgtcagcttattagactctccaggcctgaagccttgggacaactggacagtgcctatgtcaatgcgagaagttgaaccaggtgtgagacttataatgaacaccaaccatatagcggacgatcacgattggaagcctcgtcccgcaactaaggatgaggactgattatgaacattaatgagaaaacacccgttggtgaagttcgcccgagccaattgctttggacatatggtcctggagccctcattgatttgcccaacttgtcagttgtaacacttgggatcgacaggtgggaaaagaaccgttgtcagccaattcaggaaacccggttactagctgccgttagaaaggtattaggtgaccaggttgaaagcttgcgaatgccaccatttcaaaaaagcgaagtcacagatatgtggtctgctgaagcaaatataggggtacctgtacgtcctttccctagatggttgcgatgcgttaaatgtgggttactttcaccttacgatgccgggcttttcgaaataaaagaaaatcgatttaggcctgaacgaactcgctttgttcataaagactgccggggttctaagggcgatcaacctgcaagggatgctgatgcagttccagcccgttttctcttggcttgccgtgatggtcatcttgatgattttccgtggcactattttgttcatggcggtaacaatccatgcaaaggaacgctgcgattttttgaaagtggcgcttcattgcagacagaaaatctttgggtaaaatgcgattcctgtgaattatcaagaagtatggcgcatgcatttggtaaggccggtaaagaaaatcttcccgcatgtagaggacgtcatcctcatctggattactttgatgctgaatgtgacgaagaacctcgtgcagtactgcttggggctacgaatagctggtttcctgtaacgctatcagcactagcgatcccattatcaaatgttactccattacatcagataatcattgattactgggatgatttttctgatgtagaagatctttctgaacttaaagggatactaaaaatcctcaacaaacgtggtgaagctcaaggtattgaaaagcatgctgcagaggaaatatggtctgcaattgaaactcatcgctcacaagatggcgaggattttgtcggggaggctgatattaaagatcctgaatggaatgtattaatagaacctaatccccccactgattatcctcattttatgagtaaaaaaacccgtactcctacgcggtttgcgccatatattgagcgagttttactcttagaacgattacgtgaggttaatgctttacttggttttacccgggtcgaggctcctgaagaatctgaagatctcaacgaaagaccgcaaatggccagcctgtcacggagcaaacctgattgggtacccgccaatcaggtccatggtgaagggatattcctgcagttcaatgaacaagcgcttgtggcatgggaatctctggacgctgtaaaacaatcggacaaaatgcttcgcggtgggcatacaggttggagaaatgctcgtcacttggatccagaagaaggttatcctggtattcgctatgctatgttgcatacactttcacatttactgattcgagaattggctctggaatgtggatataatgccgcgagtattcgggagcgtatctatgcaaatacaaccaatggtattcctcaggcgggtatccttatttataccgctgcagctgactcagacggtactttagggggactggttgatcttggcaaaccagaaaatcttggtcgtttacttgaacaagcactaaatcgctcaaggatctgctcatcagaccctttatgttcagagcatgatccagagaaggatcgttctctgcatggagctgcttgccatgcttgtagcttagttgcagaaacctcttgcgagaaagggaatcgttatttagatagagccctgcttgtaccaacactggaacatgctgaagcagctttctttaaggatttattaaatggatgatcttctggatgctattacagcgctgagctctctaatttcatctgaaaaaataagagctatcgctgaaaacatcagccatattgatgataataagtctataaccacattgtataatgtggtcaatactccggtagcagcgacagtagtcaaacaactcattatggcttggcaaaagacctctgtcagttctagtgagttggctgcaatgctccttactgccagccatgtctattcaaaagccacttcagagcaatctatcgagttagtgtggacgggccccacaacaccatttgtttcagcacgtcgtactgaacaggctttgcttcaagttattagtaccgctgagcgcactctgtttataaccagcttcgtcgcttatgatgtttcaacgatagtgaaagccttaaatgctgcaaatgaacgcggggttatgatctcaattttacttgaattatcgcaaaagaaaggtggtagtttaaattttgatatcattgagaagatgagaatgcaggtcccttcagccaggctttatgtatggcataataaagctaatgaatattatggcggatgtgttcatgcaaaagttgcagttgctgatgttaatgagtgctttatcactagtgcaaatcttactgggcatgctatggaaaaaaatattgaagctggggtgcttatttctggtgggagtattccaaagcaacttaatgagcatcttttttcccttattcaaaccaaagttatctgcttggtttgataattctgcctcaatggattaggtaacttattaagagagtgaggttcacatagtcggtttcaaataatgacgttccagagatggtagggcagggtgtgaaccttcttggccatcacagattgagccctcaattactaccgcttatattttgacgcttcggtggctaatgaaaataatagggctttcttgacccggatggccacaagctggagctacatgtgggagatttagcatctcgaatggtgcaatgccgtgagaagccttactctggaatgcgtttcggtcctggaaaataatcacgcaactttgtgatcttccacccagtattcaattttatgtcccattctgggggcaaattcccaaaataaattataacaacccattaattttcaatgaattaaacgcaaagtcgagtccggcgtagccatcagaacagaacggcatggatggacttcaaaacacgacttacctagcggaaggctgtacttatttgtatattctccttattatggaacttattagcaataaagaatgaaggaaacacaaattaagtttcttaccgggaatattaaatctatcatgaatggtttaataaaatatgttcctaatatgactaggtaaatagaaaagttaaaatgtgaaagagagcagggggatcttcgatggtaagctatgcagtataaatggtgcaaagaaaagtggaaaataagcaatgcgaagcctatcataaaactaaaaatggatttcttgtaattctgaagcaatgggccgattgaaagcgtatagatcattttttaaagatgttgagctggaagttagttaataaggtttccaaaatctagaaaatatattggagggcatagcgttggctaggaagttcttatctaaagctacaatgaaaggaagtttaatgaattggatatctctagaggaaattcttgactctgatgaagaatacaaacaataagaacgccagaacggcgtcctttaaagaaatgataggatttatctatttggttttataaatgaacttatcaatggtataattaaccatcctgttagttgcttcaggtagtcaacaattgtaccatccgataataaataatggagagcaaatagaatgggtattaaaaatatatttttgcaagttaaaaatttattcaaatttaaaacttttattctgccacgcattgcgattagcgaacgcttacgcgtcttggtgctttgcactcgcgatctcgcaatgcgtggcagagcttagcataatttttcaaataagtcaacgtgttagtaataatatcctaataaattcttgcttctttatccataaatattttcatatcgccctctaaataatgtcctacctgtgcattcctcatatggcattgatttaagttgaaaattatctgaaccaatactgtttttgtgaaaaaaaacttttcaacgaaatatgatggccttgatagactaccttttgctgacgtaaacacccttgaaatccccatggcataagggatataatgatttcacatggtctgttgtgtgtcacttaaggttaaggagtgcgtatgtctgttatagcactggtccgtcagcggattaaccgcatgagacgaggtataccgttttctatcagtgggttctacccgctgggaagtcgcgcatctgtacagcaggctatgagtcgtctggcaaaagaaggcatgattgttcgcgtagatcgaggattttacgcgcgaccgaaaccactcaagaatattccttccatcaagatcgtaaccagtgctgaaaaggtagtagctgcatgggctaaagagcgtggctataaaattaccatccaggggctggaggctgcttatcggctgggtatgcagacgcaagctccggttaagcgtatttactggtcgaatggtccaaccagagagtttaaggttggcaacgagactgtgattgttcagcacaagtcagaaagtaaactgaagtggctgaatcggcctgaaggggagttgttacgtgggttgctgagcctgagtggaaagtatgcccgtctggaagcaatcaaaaatgcttttaaccgtcttaatatctcttcccgggaagctcgctcagccattgctaagaaattagtgagtgaaccagctcttcagggatggcgtactcagcttgaactctttcggcaggctatctgatgagcaacatctttgaactctataaaactgaagaagggcggggccaacttcaggaaatattcacttatgctgcacagaagcacccattgagtctgggggcgagctttctggaaaaggatctctgggttacagagatcctacgtcttctgtttgatgaaggttttcttcatccatacacagtcgcttttaaaggtggaacctcattaagcaagtgctggaatgtgattgagcgcttttctgaagatatcgatttatcgattcattgggcggaacttgctggtcattcagaagaacaggaacaagaggcctggaaagcaagtactcgtagtagaagtcagaatcaacgctttcgtgaacaacagcaaacaagactcgaagaatggaccgcggagttagtggaaaaacttaatcagcgtttccagtcttatggtatttccggcctggaggctcgtttagaggcggaaagtaggggagaaaaggtcgatatattctttcctcgtgttcacgctgatgctgcggcttaccagcgagatcatatcttattggagttcggtggtcgtaatcggggaaaaccgacggatacaataacggtaagcagttatttatccggaataaaagagctgggtgagctggagttgccatctgcaacagtccaggcatataacccaggttatattctttgggaaaaaattaccgcactgcatcagttttgtacccaagaaaaagagctaaatgcagaacgtctatcccgccactggtacgatgttgattgcctgttacagcatcagtttgccgatctttatgatacaaaagaagcaatgcataacgtgattgaaatgaagcagcagcgctggacctttcctggtgtggattatacgttggttgctaaaggtgagctacgtctggtccctgaagatgctgggcgccttgctgctatcgctgaagatcatcgaattgctattgagggtggaatgttttttaaggagcctgacgggtttgataaaatcattgaacgtcttcagcaggttcaggatgaatttaatcgtgctatgaaaaaggtaatgggacctgatacgtttaattgctaattctgtgatgttcttccaagtaatgatattaagtgcccattttggggcaaatccccaaaataaaatctcacaacccattaattttcaatgaattaaacgaaaaggcgagtccggccttcgatctagatgagcggttttaagaaacatggcaaggcataatcatcattatattaataatgagttaaacctgtctcatttcgctataccaaactatcatcgttcaaggcgaatcaagagaggcgcagtaaaagcattgaatgtttttgttatgcctccttcatccttattgatgctatccaatcggctgataagctggttgcaaatacaaccagcatttgatgcggcggatatcagctcaccatatcaataagcgcggacaacaatgcgctgaagttggtatgtgactcaataacataacccgtagatgctttatcgcggatctcgaaacagttatctgtgaagctgtaggcaaacacggacataccatcttcgccaatcagtaccttgtcagaaaggttcggatcgacatagatctcgttatcacgcgtctcaaagttgcggatgtagatattcgaccatactggttcgccgttttctgcttgtaccatgctatacagcatcaaaccgttgtactcaagcccatccatgattttgaacatatcagagtagtccagacggttgatcatcaggcgctggatatcctcgtaaacccatctcttctgagcgtcccattcagctggcgctgcttcgcgcatgaggtccgccattacatccgaggctactggattggctaccggataattattggcaaccatcagagtattaaagatgccgatcagctgatttgtatctttcatcattttccccttatttcccgaccgggtaaatcacgccatttggagaaggccacaaaacatctgtgctggcattgtatggaagttctttggtgataatcgcctgcatctttgataaggcagagtgatatggtgagtattggattagtatcaggttatcaaaggcatttgtaccaccgtcatcaaggggaattttgtgatggacctgccaccccgatggtacatttccatttgccaagcgtagaaggttattggaatcaaatgttgataatgcgtcagggtgatcggaaagagatttgagaaaactaggccgcacagtgctgttgaattgcccacgcagcgcattgtactcggcacgattgcggcggaggtaattaagctgggtaacattcatatcatccagcagaacatgggcttgtttgtatttccccagatagcttgtcaattcctgcgccgccatcggatttctgatgaccaatagtgaggccgcagcaaccatcatgccggacgtagtttcgtttaaaacactgtcataccccttcacagcatcgccgcccagccgttccgcggtttgccgaaatccttcaatgttgccgttatacacaccaccagccgctagcagtctgccaacggctttactgttcagcgttttcccctctggtattgctgccgggccgtaataatcgtaatgcatccgttgagtgggagcaggtttacgcccctgtcggtcggcaatagcgtgccggtaggcgctcgtgatttcatccttataccatgcatgccaggatgaggctgtagaggtaaaaatcagatcgccggtatcgtcgatgtaaaacgggttccggtcgctgctccagcgcctggaggtatccacaccaacaagccagccaatttgtagatcgtgctctaccttatcatagatgggatctacgtaactgcgatgtcttcgttcataaggtctttcatgtggagataaactgtactttttattgggaagaccaaaagagagactatggccgttcgcttcataagacagatcgtaatgtatacacgcctctctcagcgagcctgctggcgtcaaaatgtattgaaaatcttcaggggctaattgccgtgttaaatcatgtgaccggtaaagttgaaacatgcgatatccttatcctttcattttataagaattctccaaccttgcagattaaaaatcaaccaataaaaactctaaacatttaacaatctattactggagatcaatactaccagacatctactgccagcaactctcttaatttagcatattaatatcctttttgaataaaaaccattagtcattattatagacagagttatctctttatctttgtaaattgccccgatgccattccagataacaatacaatgaaacgttatatgcctttattttctccggcaacaaaatctgttctttaaaagtaatatccaattcataatttattaataaacgtccatcgttctcatacgaaatccatccttgatcgtatagaatatcaatatacgcagctaatataattccattataaggatcaagacgctcatcaatcgttcccgttacagggtatgccggatacagcatgaaacaatttttccgaaaggtacccagccccagccgggccgcaattagctgctcgcgtacggtatcttcaatacttttatcctgcagaataataagaccgtcacgttgcgctgagtgagaaagcgtagcaggagtgcccagttcgtcacgccagccaacacgcacattagtaagccacgaatcaaagcggtcacggctatttttcagactattgtgaaacttactggcggttttgcccgctccaaacgaggacagaacaaggcaaaagcctcttttcatttctgaacctccagtcccacggatggttgagattaaccgttcttcgacaaataccacgccacttcaagcaaatcgtcttcagatattttgaatgttacgtcctgtttttccagcgtaaatcatcacctgattatgtctgaaaagatcgttacctacactgatcaggttagttgttttggcaaaaacatctcacaccggttttcatcatcaacaagcactacatgcaaccagcaacacaaaaagaacacgccatgcccccacaaaatccgccaggagtggctgacgctggacgaggccgcagaagtcatccggcagcacaacatcacgttgctacccgccgaccttatccgccattcttttagttggcgcaaccgcagtttttgtctgtgatgctgctgttactgccaaccgcgttatggtccgggataacggtatagatggtaggaagtggctttaagcagtggttatatgttgctcaaaatatcgtccctcactacaatacgaattctatcaggaatggaattcggattatgaataaatctgtcataaagctgttgaataaaaaattcattatttcagtaataacctcatctacatttattactggatgcacaatggctgttatatggttctatctgtcaaatattgatagattagatattttctttgatgctgtaagcctcagttcagccttgggtatcattttcgtctttataatagtatcggtttcgggatttagcttagtaattttcatctcctcttttattctaatgctcatttacacagggcatgaagataatttcaaagattattcaagcatgcctcatcgaatttccattgtttgttatctaaatagcttgtttatatgctgtggtatgattgttggctactacatttattatctttatggatggaatggttatttaataagtggcacctgcttggtgttgatgcttgcttatagttatgctgtatcttttttaaagttatttagaatacagagattccgtttgcatgaatctgataactatgagaaacttccaaggaaaaaaggattgttattttttttacccttgcagcttatggctcccgggatcgttcagatattacctttattatttctgcttacccaacttgattttagtgaggggacaagtgattgggttgaaatactaatgctccttgccttaacagtggctattgttactattggcattttgcctggtgccatacatcttaatgagcgcagaaatggcaataaaatcaatagcttcatagttgttttaatatgcataccagttgtaattactttattcagtgtgtggtatcgccccatcccaaatatgatcattaatatggcaatgagtctctcgggtattagcgattggagaacgcatcagtattatgttgaaagcaaaactctttctcatagtatgtttaatggattaatctggaatactcgatactataaagaaattcccgggaggtttttcatcaccggagtcagtacatttaccttaggggatataaagttgatatgcccaactgaaataactgaaacaaggaaagagagtttgaagtttaccgttaatgatatcaatgagtatgagcaaaaagggaaacagttaaaggcagtagccatgcaatgcatcccttttaataagaacgatattcatgcctgggattcgccattatctgaaccgatctattacgagaaagttaaacagaccatagataactctatgctaaaaattcttcataccctgaaatgaggttttagaggttatctttatcacgctctcctattctgctcatcattatgggcaaccaggagagctgagcctacccagcaatagtggacacgcgactaagtgagtaaactcttaaccagaggtagctcacatgacaaaactagcatcaaccgtataaaaatccgcaggcagcactcatctcaattccgttaggaagcctttaaactggctgctgaaaacgcctgtttcaaactccagctggcggagcaggctattctccaaaaggccgtgacatatttcgcgaaacgcctgaaatgaacactgtttttattgaaaaatatcaggctgagttagcatcaaaaccatgtgtcgtgtcctccgtgtggtggtatgtctggaatcagcgacgcgcgaggataaactcacgccagtagtttcgtatgagctgcgatagcgccgtatacgaggcttttcactgggcaaaacagcgttgcggcgcaccgcgcctgaacgatgaactgcatgctcagggttaccggtttaacgtgaaaaccgtggcagccagcctgcttcgtcaggcgctgaatgggaaagcgtcacagaagctcagtcaggtcagttaccgcgaacatggcctgccggtgtcggaaaaactgctgaaacaggatttttacggcggcggcccgaaccagaagtagtcggttgacagcatctacttacgtatggatgaatgctggatgtatctggccgttatcgtcgacctgttgtgacgggcaattatcggctggtcgatgtcatcacggatgacagcacaacagacgtgtaatgcgctactggggcggcataatctgggcgatagcatgagtgcaaagggctgctgttacgataacgcctgttccgaaaacttcttccacttgctgaaagtcgtatgcattcacggtgaacactttctcagtcgcaaaaaagcggatgacggtatttaaatatatcgaatgtgattacactcgctggcgtctccaaagtgcttgtcgcgtactcagcctagaacagtttgaaaatcagagccttgcttaggactgtgtccatattacgtggataggataatagcgccaatacgccctgtaacgagagaactacccgttataggggagccgtttgtatcggttagccaaagatatgctggatttgacatgattattccttatctctatttataaatgaaggtaaacaaaatattataatgacccataaaaacagaccaataatcttaaccggccacgggtcaagtaaggctatgcaaacaatagcgcctataattagtagcggacctgatagtaaattaaaaacaccgcttatcacacctatttttgttcccagcaatctattcaacgcaatggcgatgatgtaagcgctgccgattgtaatcgttactgcaattattttattctgccagttattaaactcagccaggcaaataaagcatgtggtaataatataggtgcagagaactatatcgacgagtggcgtgataatttttttcatatcacccagccttagcattcgtatttaaatgatcttcaactcttttcataatcttgtcgaatacggggttgccctcggtgtttcctgcatggatggcatcaacaaaaggttgtaccgcatcggcaaataagaaataaagaagatcataatcgcggggtcttaataacgagtatacctcgggcgcttcattcctgagtttatcagaggtcctgatggatcgctctgccattccaccaaacaagaggatagtacttaaaaaggatattggattccccttccccttaaatactacataagtaaatgacgttttttctataacggctttagcgatgttcgatgcgataatattcgtagagattctacccacgatagaggtaactacacttctgtatattctatcttgttctgattcggatagatatttattaaataactgaaagattaatttaactgcatataacgatattttcatagttaaggatgtcgtgtcttatcgcggtcatcatacggattctttctgtttcacgttcatatcttgtatccgtatcaaagataccgtaaatcagataaccataatctaaaggaacagataacccaccattgataagccctgtaactgtatcaggagagataatgatgttatataatttccgcgctatcccttctatgtctgccatatagctatcctatgtttaaataaatgactgaggatgtacatcatttttgcaagaaataatcgatggtaatttacaagagaataaataacttgataagtgttactataacctaattgttacaaattgtattgcaaaatgattttgaaccattgatttaaataaggcttaaaacagcatagtatatcactttacggttgattattatgatgaattatcttggtgtgagatgtattaatttaataaataataaagcgcatataagtattcgataagtgattggatacgcaaaaaatttggatgttaaaatatatgtatttgctctgacttgttcatggcagaaacaggttatgactcatgaacaggcggtttatgtgaacacatcgacagcatcatgttgtgccgtcgatatccttcacgagcaaacattgacggattcaccagagtgatatccgcttccggcgtgagagcgggggctatagccaagtgtttgaaaataaataaaagaagggctaacaccaatcgtttcattacgttctgccgcgaactacggcgggggaaaagcgattggtttgcattatggcgtgacgaccgcggaattgacgatgagacgtgggtagagggtgtgaaacgtggtaacttccgtttgcatccgggtacggtttccgagggttgtattactatcacccataattctgatttgccatgatccgaaatgcgcttatgaatacatcgttagtacaggttccctgcatgcgttccctgatggctcgcggttgggtggaggttgttgccagtggctctaataacgtttgctcgtaaaatcagtaagattatttattttatattgctgtttttggttctgggacgtgcacttccaaggccggaaatctatctcgattatgatatcgcaagggatatttgccacttcttgttcgggagtgtgaacgccgatacgatgtatgacactttcttttatatatcgctgataatagtaatattcctttcagctgtactctacattattacattgcagttaatttcaacgataaggagcaaatgagatgccaattcctccgtatatgtgtcttaaagacgatggtggtgcagacacgaaaagatctgttgatgttcaggagcgagaaggtagcatcgaaacccgcttatcaccatcccccctcatcccctgaacacctcccgccggtgccatgccacaaacccttcctgcggatagcattctttcccctgcggcaaggtaatcggcttaccatcaaaatcccagaacagcctgccaacaatgcccccgccgttcaccgctggcgaaacctggatgcgcatatcctcatccagaccaatggatcctttatcaaaagccttatggtgaatcgcgcagagcgccaggccgttagggatttcgcaggggccgccgtgctgcttccatttgatatgggccgcttccagggcgacagaggtattatcatggcgcatattgaagccgcagatagcgcactcatagttataggcgcgcagcacctgctggcgaaaatgcgggtcgcgctctttacggatttgctgcagatcaaaccccatctcttcagccagttcttcctgaatactctccgggaaatgcgcctcgaggatctgatgggcgagggtattgatcagcctcttatttctgttaagtaacgcaaaatgcggctcatcgaagccgccggcgacgtgacagagctccagctctttgccgggcggctgtcggctgccctgggttgaacactggtcgctgttgtgcagctcccagaagccgtcgcctttcaggcgccagaagggcatatccggccggtactggcggcgctgcgggccaaagcgttccagcaggctatgcagctcatcgcgtatctccgaggcgtagtcgaacatccgcgcatggccgcgctggtactgtgagagaacgtacagcagcaacagtggcttatgcggcgcacgctgttcgcctttgcgccagatagtgatgttctcgatcgcgtgttgcagggtcgtgctggagggcatagcgttacagtggcagctaaataaatgcgatgatgctcgcaaaatccttgccgatcaacccaccagatgcggcggttctacgtggatcgcgatttaactatcactgctagttatttgttcgaaaagcccatagctttctatttatactcaagcttcgcgccatcagatagctatgtcttatgaaaaaactaccggaccatttatccagggaatgcatcatcgccgccattcgcgcttacgatgcaggcgttgcgcatcagtttaaaagcgcgcgtctgtatgagatcgagtttgaggggcgtcggtatccttcaaaagccatcgtcgggttagcggccacgcttgcgacgggtacggaatttaccccggcggatttcagcggggggattaaatccaaatgcgtgcgcctgttactggagcaaggatttacgatcgcgtcgcagggcgctggcgatgacgaggttgcgcttttccccgatgagggacagacgaccatggagtacgtggaaggggcggcgatgcaggtggtgatcaatcgttatgagcgcgaccgtcaggctcgtcaggcggcgcttcgcctacacggctgccggtgtcaggtatgcggtctggatatggccagccgctatggcgaaatcggccagggttttatccatatccaccatctcattccactgtccgggatcaagcaggactaccgtctgaatcctgaaaccgatctgatcccggtatgtcccaattgccatgcaatgctgcaccggcgagatccgccgtttactcccgaagagctgaaggcccggctgcgccccgcagactgacatccgacagcactcgctttaattacatcacacacagcacaaaaccccacgctacctcaccggtagcgtgggcccgccctctcttacttatcccgcgtctcgccagcctcccagctgtagctgccatcggccgctaacctatcgcccagctcctgatactcgaactgataaaactcagcctgggtgccgtacccggcgtagtctaccgccgccaggccgacgaacgccccggtaaagaacccgccgtagctctgcaacacatagtcatcggacagtaccgcggcatccagctgaaccgggatctcggtgaaggtcacgccatcgaagctgtattcatagctgtaggtctgcttgcggaccttggtccggaaccagacgtattcgacgccgtccggcaccttgatggcgttatctttcaggtacgacgtgtatttcccgcggttattttcgccgacttcgatgaccttgccgttaatttcattccaggtcaggaagacgaagctccagtggcggtcgttatagtaattcgttaacccggccatctgctggtagctgaagggttcgaatttcaccttcaccgcggcgtcaaaatagaaggcctgccagcggcgggcaatcagcgacaggtcatgcgtattggctaacgaaccctggccgattaaggttaatttgccgttgccggtggtgcccattttggccgtaaacggcacccgcagggtattccagttcgggtcgagcgctggcgaggtaaagtcatcctgctggctattatcgctggcgctttcggtgaagatggcgtctttcggcccttcgacaaaggttttcccgccgtgaccgccttcaatacgcggccagccttcgtcgtcccagtacactttctggatcgcggtttcccggccgagggttgaccagccgcgcgggtcgtagatggattcccccgggcgattccatggccgggcgcagagcgaggcgtaataccattcgccttccggggtggagaccagcgcgccatggccctgtttctggatgtagctgtccggcgtgtcgacgttggttaagaacacgtcacccggctcggtttcgaagctgtcggcctcgagggttttcgaccgcgccaccacctcctggtgggtaaacacggtgccgccctgggcggcaaacagatagtagtagccgttcagtttatagaggtgcggcccctcgaccagcgccacggcggtgccgcggtagatggtgcgcgcggtttccggcattaacttcagcgtgttggtatccagctccgttaaggtaatgccatcgaaggggtgatggtactcccggtgatcccaggtttgctggacgatatatttccggccatcgtcgtcatggaacagcgaggcgtcaaacccgacgccgttcagcttgatcgggtcgctccacgggccccgaatatcctttgcggtggtcagatagttggtcatgtctttgaaggcgccttcggtgaccttcacatcggtatacaccaaccagaattgcccgtcggcccaggagagcgccggcgcccaaatgccgccggaggaggggttgcccttcatatccagcagggtggtggtggagagcggcgaaggcagcaggttccagtttttcaggtctttggactcatgtaaacgcacgcccgggaaccactcaaacgtcgagttggcaatatagtacgtatcctcgacgcgaataatactggggtcggcattaaagccgcgtaatatcgggttttgaataagtgacatttcattacaccttttaaaatggaaagttaaggatcggtctgatttataatttttttaactacacgcggatctcatccagctgacggttgatgtcggtaacatgtttatcggagatcggataaacctgcatgatcaccatcgaaatagcggccagcgcaattgggatccacaccgcggtcataatgatcccgtcgatggcgctggcgctctgcacggcgccgctttcattaaatccatacaccgccagcagccacagcgggatagcgccgccgatggtgaagccgatcttgaagaagagtcccataatggcattgataatggcggcattgcgtttgcccgattttaattcgccgtacgcgataacttccggtaccagcgcccacataaagccggtggcggaggttaagccccactgtttaataaaggtggcgatgtaggccagccacagggcgtcgtgcatcccttcgcgggaccagacgtaggtcagcagttcgccgacgatgaacatggcgaggaacagatggaagaagccttttttaccaaagatttttttcagtttcggccagaacaccgggaaggcgatgccgggaatagacgcgacgagacccaccgcgcccatccattcggaatggccgacgacgaactggttgaagaagccgttaacggtgttcatgaagaacatgaaggtaaaggccagcataaagaacatgccgagaataaccagcggacggttatgtctgagctcgtggaaaaggtcggtagttttgacgttggcggtctgctcggcggtcgcgacaacgcgttctttggtgcatttgtagcagataaacagggccaccgcgccgatgatcatatagatggcgtacacgccgaaccaggcgtagttcgctgacggatcggtatagttgccgagattcagctcaaggccaaaaaagccggtgtctttcaggctgcgatctttcggcgccgccatctgcacaaacatcgggaacagggtatagaccagcaggttggcgctgttggccagcatcatgcgggtactggtcagcttatcgatcgattccgggtcgcgggtcagcgacgcattcagcgagccatagggaatattgactaaggaataaaccaggtccagcgccagataaataataaaggcgaaagccaccgaacctttcaccccagggattggcgcgaacagtaatgccgacaggatcaccagcggcacgccggctcgtaacagccagggacgatatttccctgcttttgaggttcgtttatccacataagttccgaccatcggatcccaaaacacgttaatgatgcggacaaaaagaaaaataaagcctgccgttgccgtgctgatggtatttaccgtcagcatatgcaaagccagaaaacccccaattgtgccgaaaaccaggttttgcgcaaagtcgcccatgccataaccaattcgttctccgcgggttaatttatgatattcatcatgccgactgtgcattatgtttttactcattctaagcagactccggtttgttttgtgtaggtgaaacactttctgacacagttgaccaggaagaatctattacgtttttaaattacgtaattatgtttttttacttctgtgatcctcgaagcaaaggcctgtatcacctgcgttaaaccgttttccgccgctaattttcgggcagacagacaaagtgacaaaaccggcattttaatttgatatggatacctgaattccccagggagtgtactctatacgcgcgcgaagcgagatatttaaaatagttttatttgcgagatggctcacatttgagcattttctcaatcgccgagtgaaataacgtaattgagcaaccgacgatgagaatacacgatgtgtcacagttgttaattttcctgtttctcaatttcggagttcatcatgcaaacctatttcgaccaggttgatcgcgttcgctttgccggacccaaaaccgataatccgctggcatttcgccactataatccggatgaaatcgtgctgggaaaacgcatggcagaccatctgcgttttgccgcctgttattggcataacttctgctggaatggcgcggatatgtttggcgccggttcgtttgagcgtccctggcaggccgcgggcgatgcgctggaaatggccaaacgcaaagcggacgtggcgtttgaatttttctacaagctcaacgtgccgtattactgcttccacgatgtcgacgtctcgccagaaggcgcgtcgctgaaagagtatttgcataatttcgccgtgatgaccgaggtactggcggagaaacagcagcaaaccggcgtgaaactgctgtggggcaccgccaactgctttacccacccgcgctacggcgccggggcggcgaccaaccccgatccggaggtgtttgcctgggcggccacgcaggtggtgaccgccatgaacgccacccaccagctcggcggcgaaaactatgtgctgtggggcggccgagaaggttacgagtcgctgttgaataccgacctgcgccaggagcgcgagcagattggccgcttcctgcagatggtggtggagcacaagcataagattggctttggcggcacgctgcttatcgagccgaaaccgcaggagcccaccaagcatcaatacgattacgatgtcgcgacggtgtatggcttcctgaagcagtttggtctggaaaatgagatcaaggtgaacattgaagccaaccacgccactctggcggggcactctttccaccatgaaatcgccagcgccatcgcgctgggcattttcggctccgttgatgccaaccgcggcgatgcgcagctcggctgggataccgatcagttcccgaacagtgtggaagaaaataccctggtgatgtacgagatccttaaagccgggggattcaccaccggcggcctgaactttgacgccaaagttcgtcggcagagcaccgacaaatacgacatgttttatggccatattggcgccatggacgtgatggcgctgtccctcaagctggccgcgcgcatgattgaggatggcaagctcgatcagggtctggcaaaacgctatgccggctggcagggcgagctggggcagaaaattatgagcgggcagatgtcgctggataatattgcccgatacgctgagcagcataatctgaatccgcagcctcagagcgggcgtcaggaattactcgaaaatctcgtcaatacctatatctttggttaatttttgctgacatgcccccgcgggggcatgtattccgccgtctatccgctgccgggaaatagcgtttattggttcgtgctgtgtttttttgtcagtggcgaaagaccacctgtttaatatcagcgaaggaggaagggtaacgataattgtgtaacgcctctgtgaccgtacaaaataaaaaataacttgttctgatgatagcgacatattctgtcagctcagaataggctggttattgtctgaataaaattaacctatattgagaaactcatgacaatgataaaaaaacttccattaaccatggcggttatcgccgcgttttttccgcttacctctgtaatggcgcaagaatttactcaggaacagatcgacgccatcgtcgccaaagccgttgataaagctctggccgaccgccaggcgaaaatcgacgccgcggccgacaaaaaggtcgacgtgatcaccaacccgcagaccaccgccgcctcgccggatatggccattccgttcggcctcaagttcagcggctatgcccgctatggcgctcacttccagaccggcgaccagaaatatgtcggcgtcgacggctcctataacggcgcctcggcgatcggccgtctgggcaacgaaagcaacggcggcgaattccagatcagcaaggccttcaaaagcgcgcagggggctatctgggatcttaacgtgatgttcgaccactggagcgacgaagttaacctgaagaaggcctacgtcggggtcaccaacgtgctggaatccaaccccaacgcctatatctgggccggccgcgacttccaccagcgtccgcaacaggggatcaacgactacttctggatgaaccacgacggccagggcgccggggtgaagaactttgatatcggcggcgtgcagttcgacgtggcggcggtgtcgcaggtgaaatcctgtagtccggaagtgatggccgatgagaccaacccgtcgcgcatcacctgtaccggcagctccgacaccggcgacaacggccactacgcgctgaccaccaaaacccacaacatcaaggccgggccgatcgacgtcgaggtgtacgccaactacggctttgactcaaaggcggtggacagcgacgcgcgtctcgaagcctggcagggcggcctggtgctgagccacaccaacgacagcggggtgaacaaggtgatcctgcgctattccgacaactcggataacagcgtctataacaaaaccgacgacctgaccacggtctacgccagcttcgagggcagccataagttcacccagcaggcgcaggtggaatatctgctggccttccacgactacgacaacggcaaggacaataccgataaccgtaaaaactacggcgccatcgtgcggccgatgtacttctggaacgacgtgcactccacctggctggaagcgggctaccagcgcgtggattacgaccagggcggggataaccacggctggaagctgacgctgtcgcagaacatcgccatcggcatggggccggagttccgtccgatgctgcgcttctacgtgaccggcggccaggtggataacgagcacaccgcgaaggtaaacggcacccaggaccagcagctggattcgctgaacgtcggcggaatgtttgaggcgtggttctgatgcgatagcgttgtcgaaggagcgttcccggctggcgctacgcttagccgggctatgactggtgcgctccatttatgccggatggcggcataaatgccttatccggcctacgttccttcctgcgggctcccccccaggaccggcaagcgcagcgccgccgggcggtcaggctccatacctgcggtagtgacggatggcggcataaataccttatccggcctacgttccttcctgcgggctcccccccaggcccggcaagcgtagcgccgccgggcagctggcccatcccccttcagttcaccgtcaggcgcagggccagatcctgcgggtagggatcgaaatagttctgcgcctgcaggtagcgatccggatactcggccagatagtgcttaagcagcgtcagcggggcgaggatcggcagcagcccggcgcgatagttgaggatcacctcccgcagctcgccgcgctggcggctgttcagctggtcgcggaaataaccctgaatatgcatcagcacgttagtgtggtttttccgcgaggcgggctgcttgaggatcgccatcagcttctcgcggtaaacctcgaagaacgcctccagatcctcccattcatgcagcgaggcgacgaacgggccgatctcccggtagcccgcctggtggtgagccagcagctgcagcttgtagcggctgtgaaaggccagcagaccgtgacgggtcaggccgcgggcgcgcagggcgttgagttcatgcagggcgaaaacgcgctcgacaaaattctcccgcagcagcggatcgtgcagccggccatcctcttccaccggcagccacgggtagcgcgccatcagggcgccggtaaacagccccacgccttccttacgcccgcgattgcctttttcgtcatacagccgcacgcgctccatcccgcagctcggcgatttggcgcagacgataaagcccgacagcccgcccagggttgcgaggtgggcgctggcgaaatcagccatcttctccgtcacatcctcgtgcggggcgtggctgaagcgcatgcggatctccccgaccggggtctgcaccaggcggagcgccgggcggggaacgggcaggccgatcgccatctccgggcagacgggtttaaacgccacccactgcgcgagctcatccatcacaaagcccatacgcttatgcccgccgtcgaatcgcacggctgagccggttaaacatccgctgatcccaatgacaggttgcgtgttcatggcgctgtcctctcttctgctgtggttcgggtaaagaaaagggtcacggtggcgaccgtaatgccgaatttcttcatctcggttttgttaaataaatggctgccgtcctgcaggaacatccagtcgtcaaagtgcagcagccaccggctgccgctggcctcgacgttcatgctgtagcgccagtgaaaggcattgcctgccgcctggccgctggccacgccttcgatatcgccggcggtgccctgataacggttatcgccggtgcggcgaatgcgccatatccgctgctgcttctcgccgtcgtcatagacaaagcgctcatggagggtcagggtgtcgccgacgacgtcgccatcgatctcaacatggaagcggcgcagctgcttgccgctgcgatcctgcaccatcccccacgcctcggttcgcccctgaaaatagtgaaagatgtcgagggcgggctgctgctgccggtactccgtgacctcggtgctgcagccggcgaggatcagcatcagcagcgccaggccaagggtcagaatgcgtttcatggtgtacctccgatcaactgctgacgcagttcgggataagtggtgcgcggatcgagccagatggcgagaaagcgggtgctgaacgccgccgactggcgcgggccgagcggggtaaaggcggtctgcgcggcgctggcgcggtaccagaactgcccctcgccgccgctgaccacgaacgccagctggctgcccggcgcgacgtccggccagatcccctgcagcatgcgtagccaggcttcgctgcgcggttcctgctgcagaatgccctgcgcctgccactggtcgcgggtggcctccaccagcgcctcgcgatcgatgtcgcgccggtaggtgatgatcagcgcccgatcctgctgcgggccgtcataccggccattgggcgtacgcagctgcgagtgatagacggtgaacggcccccaggtgagggtcgcctcgccgacgcggcgccacgtcagccagtcggcggcgtgggccgccggggcgaggatggtcagccacagcagtaacagggcgaatctcatttttgcctccccatccccagatggaataacagcatgagcaccagccagccgcaggccatggcggccacgccaagcgccgtcggcaccagcagggtcatggctccgaggcgatcgccgatcaggtaggccaccgggccgccgacggtggcggccgtggccagcacccagccgggaagcgtcgcggtgcgggtcagtcgggtccagacgacggcgaacatcagccacagggccaccatccacaggggcagcaggctgtcgccgcgaaaatcgatcagccccgccagcgcccagcaggcgtccaggccgcagcccgccgcggccaacagcagggcaggcggacggctggccgccggcaaccgcagccaggcgaaaatggccagcgtcagccagatcagcagaccgcgctcgcgcaacatcaccaccagcgtccagtaaacatcgaacgcgagggccatcagcaggtgctgcgccgggcgtgtcatacccgctccgcggtgagctgcaccacgctgatggtgcgggcgttaaatccggcttcgcagtagccgaagtagtagagccacatccggcggaaacgctcatcaaagccgagcttttcaatatcctgccaggcgtgggtaaagcgctgccgccagtgggccagggtgcgggcgtaatccgggcccatgtcgaacaggttgcgcaccacaaaatcggtatggcgggtcatcagctcgctcattgccgtgatgctgggcaaaaagccgccggggaagatgtagcgctggataaaatcgacgcttttgctgtagtcgcgatagtgctgatcctggatggtgatcgcctgcagggccattctgccgcccgggcgcaggcgcgcctggcaggtgcggaagaaggccgggaggtagcgctggcccaccgcctcaatcatctccaccgacaccagtttgtcgtactcgccgcgcagatcgcggtagtcgcagagcagcacctcgacgcgatcctgcagcccggcgcgggccatgcgctcggtagcccagcggtgctgctcccgggaaagggtggtggtggtgacccggcagccgtaatggcgggcggcgtactcggccagcgccccccagccggtgccaatctccagcaaatgatcgccgggagtgagcgccagctggtcgcacaggcgcgccatcttggcacgctgggcctgggtcagatcctgctggtcgtcggtaaacagcgcgctggagtagagcaggtcgtcatccagaaaatgggcataaaattcgttgccgaggtcgtaatgggcggcgatgttctcccgcgcctgggcgcgggtgttgcggcgggtccagtggcgcaggcgggcgacgggcttgcccagcagacggaagccgcgctccagacgccccagcacctcgccgttgcgcgcaaggatctgcagcagcgccgtcagctggtggctctcccagtcgccgtccatccaggcctcggccgccgccaggctgccgccggtcagcagacgccagtacacctccggcgtgcagacccgcgcctcggcgcgcagcgcggcggcggggtcgccaaaatgaaaagtctgcgccccttcgcgcacggtgagcgagccttcgcggaggccgctcaacagacgaaaaagcagccagcgcgcgagccgcacgttgcgcggcacatcgggttcaagcgcaaagacgggatcggtcatgagcgttcactcctgctgacaggatggttgtacagcggcacgcgcttcagccacagccgcagcgcctgccagtagatggcgaggacggttttcagggtcatcagcggcagacgcagcagcagcccgcgcaggttggcgcgggtcaacggcacgcggctcagggccagcgtggcgtcgaacaccttgctggcctgatggttttcaatatgcatgtgcagcgttttgccgggcgcgttgaagcgccagtgatagaccatgtccatcgggttaaagggcgaaacgtgaaaggctttctccagcgggcgcgcctgctggccgtccaccgcgtagtaatgacgctcattccacggcgtgttgcgcacttcggccagcacccagcgcagggtgtcggcttcgtcatagcagtagtaaaaattgaccggattaaaatggaagccgaagtagcgcagctgggtcaggagcatcacgcggcccgccgggcggcagccggtcaggctctccagccggttcagcacctgggccttcagcggcgcgcccagcggataatcggcgtcgtaccaggcggcggcggccaggcggttgcggcggatgcccgcctcaggcagcttgtccagttcgtcgaggtcgagccaggccataaacaggcggtagacgaagtggtgcgccttcggctgcaggcgacggtggcgcaggacgccctgatagaggcagctgttcatttcagtggccctccgccgcggcgatgccctgcaccacgtcgagcgcgctgcgcaccccatcctcatgaaagccgttgtaccagtaggccccgcagtaccagctccgctgctggccgttaatctcttcgcgccgcagctgggccgaccagctttgcgggttaaacaacggatgctcatagacgaagcgctgccagacgtagcgatcgtccaccggcgcgtccgggttcagggtgacgcagaacagcggcgcgcccgcgggcagcccctggagaatattcatgttgtaggtgacgcaggcccgggcccgatccccgtcgctcaggcgatagttccagctggcccaggcgcgctggcgctccggcagccagcgcggatcgctgtgcagcaccacctcgttacgctgccagccgatgtccccgaggacttctcgttcggaatcggtgggcgccgccagcatcgccagggcctgcgcggagtggcaggcgaagatcacctggtcaaaatgcgcctccccggacgccagccgcagggtgacccccgccgggtggcggtccacctgctgcaccggcgcgttgaggcgtagatccaggcgatcgccgagcctggcgagcagggcgcgaacgtattcccgggaaccgccgggcaccacgtaccattgcgggcgatcgcgaatatccagcagaccgtggttttcaaagaagcgcaaaaacagcggcagcgggaagcgacgcatctcctgcagcgacgacgaccagatggccgcccccatcggcagaatatagtggcgggcgaagaaggggctgaaacggtggcgggtgaggaagctctccagcgtcgcgcctggatccagcgcctcggtcagcgccagtttcgccaggcggttgaagcggacgatctcgctcagcagtccccagaaggccggcttcagcagattgcgccgctgggcgaaaagcgaggtcaggctgtggccgttgtattccaggccgctggccgggttgtggaccgagaagctcatctgcgttttttgcccggcgatccccagctcgctgagcaggcccataaagcgcggataggtgcgatcgttgtagacgataaatccggtatcgatggcccaggtgccctgcggcgtggcgacatccacggtggcggtgtggccgcccggcgtggcgcccgcttcgaacagcgttacctgatggtgtccggccagtcgccaggcgcaggtcagcccggcgatgccgctgccgatgatggcgatattcatgagcgcaccatcctgcgcaacagcaggcgctggatacccgatggcagactggccagcagacgcagggccaggctgaaaccggtggggaaggcgatgtggtttttgcccttcgccagaccgtggcggatcgccgccaccgcccgatccacgctcacccggccgggcatggcgaagtcgtttttgcgcgtcagcggggtgtcgacgaagcccggagagaccaccgtgacggcgacccctttcggctcccagtccagacgcaggctattggcaaaccaggtcagcgccgccttggaggcgccataggcttccgcgcgcgggaagggcagccagtgcgccatggagctgaccagcaccacccgatcgcctgcctccagctgcgtctgcagcgccgccaggcagttcaccggcccgaggaagttggtggccatcacccgctccacgagggcggcatccacctgtccgtggtcgaggtattcgcaggtcccggcgcagagaatgatcaggtcggcaaaacagcctgtcagcgcctggcgacaggcgtccctgtctgtcatatcgaacaggcgtacgctaatgttggggctgagctgctggagcgctgccaggcgcgacgcatcgcgcccgcaggcgatgaccagatggccatccgccgcgaaggatttcgccaggccggcgccgatcccggagctggcgccggtgatgatcaccgtcatcatgagcgcaccctccgcttcacgccgcgtaccgcccagcccagcaggggaagatgctcgtagatcatctccccggcgtcgtagtagtcgcgctgatggagaacctgctccccggcgatgtccaccaccgagcagcccggcagggccagggtttctccgccggcaatgcgcggatgcgaccagtgcatggtccaggtcacggcgaaccgctggccgtcgcaaagcggcgtgtcgatggtgaaccggcactgctccacgttggccagcagatgggtaaagtagcgctgaatggcgaacagcccctgatgctgaccaaaaggatcgctcagcgtcgcgtccggatggtacagcgcggccagcgccgcgggcggctgtgcatccagcccggcgtagtactcaacgaaacgacgaatcacggacggcgaggtgctcatggatcacatcctggctagatacggtagcgtaatggcatacttaaaacttacacaaataaaattatttgtccaagtttgtagaaaaatatattttatttgtgttaaaaatcatgttgttatgattggtgttttaaggagtgaaaatcgcgggtggcgcaaagggtaagcgtgagcccgccgcgccaccgggcgctggcggaacagagcgtggaggtaagtgaaaacagggggttagagcgggatcacctcgaggaagacgacctgctgctgccagagttcgacctgcctctggcgggcggcggaaagtttgccgctggtgaccagcagccagttgcgctggggaaaaatctccggcgccagggcggcgggaggcaccggcaggacgtcgatgcgatggccctggccggtacgttttagcgcctcaagccagatttcgcaggcgtcggtcaggtgccagccggtgatcagaaagttgtccccgggcgccttcttgtcgccttcgaggcaaaacgaggtataggcgatgatgatgccgtcgagaatttcgcgcagcgtcatgatggccggcacgttggcggagacctggctgcgcagtggacgcagcacttcggttaccagctcctggcgcggatattcgcgcccggcgtcgtagatcagctggcgcagggactcgatttttccctctttcagccgctgcagcatggtctcctgcagcgtcagccagttattggtgcgccgcgcgccggggcgcgacagcaggggtttcacctggctgaccggcaccccttttttcacccagtcgaggatcttcagcgcctgctggacgtcgtcatcgctgtacagacggtgtccaccatcggtgcgcagaggcttaagcaggccgtagcggcgctgccaggcgcgaagcgtggtcgcatttatcccgcatagtcgggcaaattcgccgatggagtaaggcatggaggccacctgttaacaaagaatattctcaatatactacgaatcacgacggctggcgtgaagtgtagtggctttgcactacactttccccaaccgcgtaaatgaaaggagttctcatgaagctatggcctgttgtcactggcgtcgctatcgcgttaaccctggtggcctgtaaatcgcccacgccgccgaaaggcgttcagccgattagcgggtttgacgccagccgttatctcgggaaatggtatgaggtcgcccgcctggagaatcgcttcgagcgaggcctggagcaggtgaccgccacctacggcgcccgcagcgacggggggatcagcgtcgtcaaccgcggttatgacccggtcaaaaaacgctggaatgagagcgacgggaaagcctatttcaccggcgcccccaccaccgcggcgctgaaggtgtcgttcttcgggccgttctacggcggctataacgtgatccgcctggacgatgactaccagtacgcgctggtcagcggccccaaccgtgactatctgtggatcctgtcgcgcacccccaccattccggcggcggtgaagcaggattacctgaataccgcgcgcgagctgggctttgacgtcgatcgcctggtgtggatccgccagacgccgcgctagcctcgccgcttagcggctgagcagatgggtataaaccacgtacagcccggccagcgccgccacgttgagcgctacgctgatgaaaaaccgcgtccggaagggctgcttttgcgttttatggcgaaagcactgctggccgaggatggcccccggccagcctcccgccaggcccagcaccagcagcgtggtttccggcacccggcgccaggctttgcgcgccgccagcttgtcggcgccatagataagccatgtcagaaggctgctcagtaaaaaccacatcgccatcgggtagggcagcagggtgctgcccacggcggtgagcagcagcagggaataacataccaggttcagattcatagggacgttcacgccggccagaagaatggcgccactatagccaatttcccggaccggcgtaaacgcggcgggctattggctacgcttgccccgatgccgggacagccacatcagcttatatgccgccggaatgataaacagcgacagcagcggggcggtgatcatcccgccaatcatcggcgcggcgatacggctcatcacctccgacccggcgccggtgccccacaaaatcggcagcaggccggcgataatcaccgccacggtcatcgccttcggccgcacgcgcagcaccgccccctggtacagcgcctcgtcgagcttatcgacgctgaaagtctgcggattctccagcgatggctccgcctcgatggcgtggcgcaggtacatcagcatcaccacgccaaactccgccgccaccccggcgagggcgataaagccggtcccggtggccaccgacagatggaaccccatccagtagaggaaccagatcccgcccacaagggcgaacggcacgctggtgataatcagcagtgcttcgccgacgcggcggaacgccagatacagcagcacgaagataatcattagcgtcatcggcaccatcagcttcagcttctgattggcgcgctccagcagctcaaactgcccggagtaggacacactgatgcccggcttcagcttcacctccttgccgatggcctgctgcagatcgtgcactaccgacaccaagtcgcggtcgcgggcgtcgatgtagatccaactggtcgggcgggcgttctcggtcttcagcatcgatggtccggtgaccactttcacctcagccacgtcgccgaggacaatctgttgcttcagcggcgtgaggatcggcagctggcgcagggtctccgggctgtcgcgatagctctgcgggtagcggatgttgatcggatagcgctcgacgccctccactgtttcgccaaccatcgccccgccgatggcggacgagacgaacagctgcacgtcgccgacggtcatcccgtagcgggccgccttctcgcgctgaatatcaatgtcgaggtagcgcccgccgaccagccgctcggctaatgccgaagtgactcccggcacgctgcgcgccaccacttcaatttgcccggcgatggcgtcgatatcggccaggttggtgccggaaactttaatgccgatcgggctcttgatgccggtggagagcatgtcgatgcggttgcggatcggcggcacccacaggttcgccagtcccggcaggcgcacggttttatccagctcctcgacgatcttctccatggtcatccccggtcgccattgatcctgcggcttgagctgaatggtggtctccaccatctccagcggcgccgagtcggtggcggtttcggctttgccggttttgccgaacacccgggccacttccggcaccgtcatgatcagcttatcggttttctgcagcatatccgccgcctgcgcagcggagatccccggcagcgtggacggcatatacagcaggtcgccctcgttgatctgtggcagaaactcgccgccgacccggttaagcggccagacaaccgtcaggatcgacaggagcgcgatcagcagggtggtcttcggccagtgcaggaccttcagcagcagcgggtgataaatgcggatcaaaaagcggttcagcggattgctgctctccgccgggatcttgccgcggatccagaagcccatcaggattgggatcgccacgatcgccagcagcgccgccccggccatcgaccaggttttggtgaaggccagcggaccgaacagtttgccctcctggccttcgagggtgaaaatcgggataaacgacagggtaatgatcagcaggctgataaacagcgccgggccgacctccaccgaggcctcggtaatgattttccagcgtgtgtcgttgctgagcttctctcccgggtgctgatgctcccattcctccagccgcttatgggcgttctcgatcatcacgatggcggcatcgaccatcgcccccaccgcaatggcgatcccgcccagcgacatgatgttggcgttgagcccctggaaatgcatcatgataaaggcgaagcacaggccgagcggcagcgaaataatcgccaccagcgccgagcgcacgtgccacaggaacagggcgcagaccagggcgacgacgataaactcttccagcagcttgtggctgaggttgtcgatggcgcggtcgataagctggctgcggtcgtaggtagtgaccacttccaccccttccggcaggctgctttgcagcgatgccagcttcgctttgaccgccgagatcacctcgcgcgcgttcttgccggagcgcaggatcaccacgccgccggccacttcgccttcgccgttaagctcggcgataccgcggcgcatctccgggccaatctgcacccgcgcgacgtcgccgagatagaccggcacgccgttatccccggttttcagcacgatatttttgaagtcgtcgagcgtctgcaggtagccgctggcgcgcaccatatattcggcttccgccagttcgacggaagagccgcccgcctcctggttagaggcgtccagcgccgatttcacttcgccgagactgatgccgtactgggtcagcttcatcgggtcgacgacaatctgatactccttgaccacgccgcccaccgacgccacttccgagacgttagggatggttttcagctcatattttaagaaccagtcctgcagggagcgcagttcggcgaggtcgtgcttgccgctgcggtcgaccagcgcgtactcgaagacccagccgacgccggtggcgtccgggcccatttcggcgctgaccccggcgggaagtttgccctgtacctggttgagatactccagcacccgcgagcgcgcccagtaaggatcggtgccgtcttcaaaaatcacgtacacgtaggagtcgccgaattgcgagaagccgcgaaccgttttggcgccggggaccgacagcatggtggtggtcagcggccaggtgacctggttttcgacgatctgcggcgcctgccccggatagcgggttttgacgatcacctgtacatcagagaaatccggcagggcatccaccggggtgtggacgatagtccaggttccgcagatgctgagaaacagcgccgccatcatcaccaggaagcggttggccaccgagcggcggataatccattcaatcatggttccgttccttagtgcgcgtgggcggcagaggccgcggcatcaggggcctgcgcgcgcatgcgctccagcgcgccggcgatattggcctccgagtcgatcaggaacaggcctctggcgacgactttctcaccctcctgcagcccgctgcgaatggccgtgacgccggcggattcatggaatacctgcacgcgtttcggcacgaagcggccctcgttatcgacggtgatcactcgctgctcgctgccgctgtcgatcagcgctttggaggggatcagcagcatcggggcgctttcgctggtcagctgcagataggcgttcatccccggcttcagcgcttcatccgggttgttgacctgcaggcgcagctgcagggtgcgggtggcgctatcgacgctggggagaagggtccatttgctgatgcggaaggttttgcccggccaggcgggaacctgaatgctgaactgcgaggcgtctttaatcagccaggcgatggattccgggaccgccacgctgacccacaccgggtccatgccctgaattttcgccaccacgttatctttggcgatgttcattccggcgcgcagatcgaaggcggtgatcaccccgtcgatgggggctgtgagggtaaagcgggtctggattttacgcgtggctttcaggcggcggatatcgtcgtccggcattccggcaaggcgcaaacgctcgaggatcccctcgacctgcgtagcggtgcccccggtctcctgcaatagcagatattcgctctgcgcttccacccagtcggggatggtcagctcgagcagcggcgtgccttgcttgactttgtcgccgacggtcaacggatagactttattgataaagcccgccgcccgcgcctgcataatcacatactggtactcgttatagctgatgttggccgggaaggtctgggcgtagcgcagcggcccgcgggtgacggcggcggttttcaccccaagattctgggtctgcgtcgggtcgatacgcacccccggcgcaccggcggcggcatgctcctcatcggcgtatttcggcaccagatccatatccataaacggcgatttacccggtttatcgaagcgggtgttcgggtacatcggatcgtaccagaacagcactttacgctgctgctcggccgccggagcggcagagtgggtcggagcccatcgggcgtacagcgccgcggtaagcgcgccgccaatcagcatgctgccgaggatcaacgccgtatttttaagtgtcagggatgccatgtgtcgtccattcagttgttgaggggcctaccgtcgccgggccgttattgggcgcggatatcctgcagcagcgacaggttgccctgctgaacgaaggtgaaatccacgctgtcgccatccttcacattgttgagctgcgtctgcggggtgatggtgaagcgcatggtcatcggcggccagttcaccgccgggatggcctcgtgggcgatagtgatttttttattatccatatcaatagctttaatgacgcctttgccgcggatgctttgcgcctgcgcggcggcgggctgctcgtgcatcaccataccggcgtgcgggtcggcggcctgggcggcgaacaccgcgccagagagcagggtgaacagggcgattttagatagtgaattcatgttcgggactccttgggttattccatccagccgccgccgagagcggtgaacagggtgatttcatttgcctgacgggaatagttgagttccagcagggtttgtcgggtggtgaaaatatcgcgctgggcgctcaggacttcgatatagctgaccgcgccgtggcgatagagcgcggtggcgcgctgcagggtgatattcagcgaggcgagatagcgctcctgcgcggcaatttgatcggccaggctctggcgcagggccagcgcgtcggccacctctttaaaggcggactggattttttgttcatagttgaccacctgctgctgctggcggatctccgccagatcgaggctggcctgattacgcccggcgttgaaaatcggcagttcgattttgggaatgaagttccacatcgcgccgccggcgttaaacaggctggagagttcgctgctgctgccggagagcgagctggtcagggtgatcgacgggaagaaggccgcccgcgcggcgccgatgttggcgttggccgcttgcaggctgtgttcggcttccagaatatctggccgctgcagcaggatcgctgaggagagcgatggcggcagggttacgccttgcaggtctaccgcgctgctggcgctatcgtccggcaggcgctgatagctgccgagcagcagttgcagggcgttattggcctgcgccagctggccctgacgtttggcgatatcggcgcgggtgctttcgatcatgccgcgcgcctgctccagcgccagcacggtggtgctcccggtcagcagctgtttttcaacgaaggcgtaagactgctgatagttctgtaaggtatcgttggccacctgcagctgcgctgccgccagccgctggttgaagtagctttgtgaaacgttagcaatcaacaggatatgcactgcgcgccgcgcctcttcgctggcgaagaagttctgtcggtcggcctcgctaaggtttttcagccggccaaagaaatcgaggtcatagctgaggtttaagccggcggcataatcgctgctggtggtggtgtcgcctttgagcttgccgccataggtggtgctgccgtcaccgttaagctgtgggtagcggtcggcgtcggttacccggtactgggcgcgggcttcctgcactttcagcgtcgccatccgcagatcgcggttgttggtcagcgcggtgctaatcaggcttttcacctgcgggtcgacgaaaaaggtgcgccagccggtctcttgatagcccactttcgcagtaaccagcttgttctggctgagagagaactgctgcggtaccggcgctgcggggcgctggtagtccggagcgagcgacagacagccggttaaggcaaatatcacgctgagggtaagtagctgtattgaacgcatggcggcagacggtttcgacgatttatccatggcggctactttacgtagcgggctctgttcagggcgtgacgggaaaatgacaaaactgtcattttcctgatatttcattgctatccggaggcgctcctctaaaattgaatacccgcacaaagcgcgcgtgaaggagcctgccgtgaagattttgattgtcgaagatgagaagaaaaccggagagtacctgaccaaagggctcaccgaggccggcttcgtcgtcgacctggccgataacggcctcaacggctatcacctggcgatgaccagcgattacgatctgctgatcctcgacatcatgctgccggatgtgaacggctgggatatcgtgcgcatgctgcgcgccgccgggaaaggcatgccgatcctgctgcttaccgcgttgggcaccattgagcatcgggtgaaggggctggagctgggcgctgacgactatctggtaaaaccgttcgcctttgcggagctgctggcgcgggtgcgtactctgctgcgccgcggggcggcggtcatcgtcgaaagccagtttcaggcggccgatctcagcgtcgatttggtcagccgcaaggtgacgcgcggcgccacccgcatcaccctgaccagtaaggaattcacgctgctggagttcttcctgcgtcatcagggcgaggtgctgccgcgttcgttaattgcctcgcaggtgtgggatatgaacttcgacagcgacactaacgccatcgacgtggcggtgaagcggctgcgcgccaaaattgataacgacttcgagccaaaactcatccagaccgtgcgcggcgtcggctatatgcttgaggtgccggatggccgctaagcgccccttttccctggccacccggctcaccttctttatcagcctcgccaccatcatcgccttctttgccttcacctggatcatgatccattcggtgaaggcccactttgaagagcgcgacgttcacgatctcaggcagctcagcaccacgctggagacggtcctcgaccacgctgactacccgcaggcgcggcgtctggagatcgtgaagaatatcattgcgggctacgccaacgtcttcatctgcctggacgatggccagggcaatattctcttccagtcgcccaacgggccggatctcagccatatgctgagtacgccggggctggcgatgcagctccgcgacgggaatgtgatttcatggaccgacccgcagccgcgggcaatggcgcacgataatcatccaatggaaacccgcgcctggcggctgatcatgctgccgctgggcaagcaggcggacggtaaaccggcgtaccacctgctgatggccttatccatcgattttcacctgcactatattaatgagctgaaagcgaagctgatctccgcggcgtcgataatcagcctgctgatcatcgccatcgtgctgtttgtggtctaccaggggcataagccgatccgccagatcagccgccagatccagaatattacctcgcgggatctcgatgtgcgccttgacccgcaggcggtgcctgtcgagctggagcggctggcgctgtcgtttaaccatatgctggagcgcatagaggatgtctttacccgccagtccaacttctccgccgatatcgcccatgaaatccgcacgccgattaccaacctggtgacgcaaaccgaaatcgccttaagccagagccgcagcccgcaggagctggaagaggtgttgtattccaatctcgaagagttctcgcggatgtcgcggatggttagcgatatgctgttccttgcccaggccgataacaaccagctgatccccgaacagcgggcgctggatttggccgatgaagtgcataaggtgtttgagttctttgaggcgtgggcggaagagaaagcggtggcgctgcgttttgtcggtagcccctgccgggtgacgggcgatccgctgatgctgcggcgggcaatcagcaacctgctgtcgaacgcgattcgctatacgccggccgggcaggcggtgaccatccagttgagcgaaagcgcggagacggtacgcctggtggtggagaaccccggtatgccgattgccgccgagcatctgccgcgcctgtttgaccgattctatcgcgtcgacccctcgcgccagcgcaaaggggagggcagcggcatcggcctggcgattgtgaaatcgattgtcggagcccaccacggcagcgtggcggcgcagtccgatctgcgctcgacgcggtttattgtgatgttgccgaaataggcgcaatccgcgagtgatagttgagtatgtggctttctgtcgctatattaaatgtacggaaaataaccgtacatgaagtttgcaccaggccggagataacgtatgcccgcacttaaaaagcagcgtatagatttgagattaaccgatgatgataagagcatcatcgaggaagctgcggcaatttcgaatcagacgattacccagtttgtggttgccagtgcctcagaacgtgctgcggaagtgattgagcagcaccgcagaatggtcctcaatgagcaagcatggagcctggtgatggaggcgattacccaaccgccagccccgaatgatcgactgaaacgtgcagcgaagcgtctacaaaccaggtaaggtagagctaatggagcagcaactgacgattgagatgattgccgatgcgttcagctacgatatcactggatttgattgcggcgaggaagcgctgaatacgtttttaaaagagcacctcaagcggcagcacgatggacaaatcttaaggggttatgcgctggtctccggggataccgttcccaggttgctgggttattacaccttatcggggagttgtttcgagcgaggcatgttgccgtctaaaactcagcaaaagaaaatcccgtatcaaaatgcgccaagcgtaaccctcgggcggctggccattgataaatctgttcaggggcagggctggggagagatgttggttgcccatgttatgcgagtggtgtggggagcgtctaaagccgttggcatctacggattgtttgttgaagcccttaatgagaaggctaaagcattctatcttcgtctggggtttatacagctcgtggatgaaaatagtaacttactgttttatccgaccaaatcgattgaacagctctttactgacgatgagtcataaaagaaaccgggcagcgccaggcggctgcccgcagtatcgcgactctcttactcttcgaagtaccagtagccctgattaatcagccgcgtcagttcgctcacgaacgccggattctgcaggccgctgccgagctcttcctggcctaatgaggtatagcgacacagcgcatccagcgcttcggcatcggtggtgtcgagttgttcgctatgcacgaaaaagctgtcgccaatatgcagaacgcgcaggccgctcaggcgggaaagcttttcaccacccagcagcgcatcgaccacttcctcttcttcatacggtggttctgccggcgcaatatccagctcgtgacgcggggtggtgacgaaactgccgaaccactgcttgaagtcttccggctggcgaatcatatcgatcatcatggtgcgcagacgttcgagttcatactcttcaacccggcccggatgctcgcggcaggtgaggtccggatcgctgtagtgctcgccgccgagatcgttctccagcacatagtcggcgaagctgctgatcaggtcgcggccgtttggcccgcggaagccgacggagtagttcagggcggtttcgtgggttatgccgtcgtgcgggaatcccggtggaatatagaggatgtcgcccggctgcagatcttcatcaatgatcggtgggaacggatcgacgtgcagcagtgccggatgcggacagaactgacgcatcggcagcttgtcacccacgcgccagcggcggctgcccatgccctgaataataaagacgtcatactgatcgatatgcgggccgacaccgccgccggggacggagaaggagatcatcaggtcgtccaggcgccagtccggcagtacgcggaacggacgcaccagctcggcggccggcatatgccagtggtttaccgcctgggccagcagggaccaaccggtttcgcccagcccgtcgaaatgttcaaaaggaccattgctggcctgccatttgccgtttttcaggctgaccagccggctgtcgacttccggctccatggctaatccggccagctcgtccggagtaatcgggtcgacgaagtccggaaacgcgttttttaataccaccggctgtttctgccagtatttttctaaaaactcgggccagttaatgttgagttgataagccatcgattattaccagtaagaagaaacgggcctgattatagaaatgagggccgggcgggcgcattgtcgtgggtcaagagtggtgcttaattcaccatcggcgcgataatggcgttgggtaagagagaaaaatcacattttcgccaaaaaccgatcttagcgtaaattgcgctgcaggccgcatgagcactgggattgcgcctttaatggtaagaagatgaattagcgaaaagttcaaataatgagcggtcgataagatttttctattttaacgcttgctacttccggcgaactccctataatgcgctcccactgacacggcagatgtgaatcacttcacacaaacagccggttcggttgcagagaaaaatcctgaaaaacgggttgactctgaaagaggaaagcgtaatatacgccacctcgcgacagagcgctaaagcgcgtcgcaactgctctttaacaatttatcagacaatctgtgtgggcactcaaagtgacatggattcttaacgtcctcggacgaaaaatgaataccaagtctcaagagtgaacacgtaattcattacgaagtttaattctttgagcatcaaacttaaattgaagagtttgatcatggctcagattgaacgctggcggcaggcctaacacatgcaagtcgagcggtagcacagagagcttgctctcgggtgacgagcggcggacgggtgagtaatgtctgggaaactgcctgatggagggggataactactggaaacggtagctaataccgcataacgtcgcaagaccaaagtgggggaccttcgggcctcatgccatcagatgtgcccagatgggattagctagtaggtggggtaacggctcacctaggcgacgatccctagctggtctgagaggatgaccagccacactggaactgagacacggtccagactcctacgggaggcagcagtggggaatattgcacaatgggcgcaagcctgatgcagccatgccgcgtgtgtgaagaaggccttcgggttgtaaagcactttcagcggggaggaaggcgttaaggttaataaccttggcgattgacgttacccgcagaagaagcaccggctaactccgtgccagcagccgcggtaatacggagggtgcaagcgttaatcggaattactgggcgtaaagcgcacgcaggcggtctgtcaagtcggatgtgaaatccccgggctcaacctgggaactgcattcgaaactggcaggctagagtcttgtagaggggggtagaattccaggtgtagcggtgaaatgcgtagagatctggaggaataccggtggcgaaggcggccccctggacaaagactgacgctcaggtgcgaaagcgtggggagcaaacaggattagataccctggtagtccacgccgtaaacgatgtcgatttggaggttgtgcccttgaggcgtggcttccggagctaacgcgttaaatcgaccgcctggggagtacggccgcaaggttaaaactcaaatgaattgacgggggcccgcacaagcggtggagcatgtggtttaattcgatgcaacgcgaagaaccttacctggtcttgacatccacagaactttccagagatggattggtgccttcgggaactgtgagacaggtgctgcatggctgtcgtcagctcgtgttgtgaaatgttgggttaagtcccgcaacgagcgcaacccttatcctttgttgccagcggttaggccgggaactcaaaggagactgccagtgataaactggaggaaggtggggatgacgtcaagtcatcatggcccttacgaccagggctacacacgtgctacaatggcatatacaaagagaagcgacctcgcgagagcaagcggacctcataaagtatgtcgtagtccggattggagtctgcaactcgactccatgaagtcggaatcgctagtaatcgtagatcagaatgctacggtgaatacgttcccgggccttgtacacaccgcccgtcacaccatgggagtgggttgcaaaagaagtaggtagcttaaccttcgggagggcgcttaccactttgtgattcatgactggggtgaagtcgtaacaaggtaaccgtaggggaacctgcggttggatcacctccttaccttaaagaacctgcctttgtagtgctcacacagattgtctgatgaacgtaaagaagcaaggcgtcttgcgattgagacttcagtgtccccttcgtctagaggcccaggacaccgccctttcacggcggtaacaggggttcgaatcccctaggggacgccacttgctggttcgtgagtgaaagacgcgtgccgatgtatctcaaaactcatcttcgggtgatgtttgagatatttgctctttaaaaatctggatcaagctgaaaattgaaacgacacacagttaatgtgtgttcgagtctctcaaattttcgcaatcagaagtgaaacatcttcgggttgtgaggttaagcgactaagcgtacacggtggatgccctggcagtcagaggcgatgaaggacgtgctaatctgcgaaaagcgtcggtaaggtgatatgaaccgttataaccggcgatgtccgaatggggaaacccagtgcaattcgttgcactatcgttaactgaatacataggttaacgaggcgaaccgggggaactgaaacatctaagtaccccgaggaaaagaaatcaaccgagattcccccagtagcggcgagcgaacggggagcagcccagagtctgaatcagcttgtgtgttagtggaacggtctggaaagtccgacggtacagggtgatagtcccgtacaccaaaatgcacaggctgtgaactcgaagagtagggcgggacacgtggtatcctgtctgaatatggggggaccatcctccaaggctaaatactcctgactgaccgatagtgaaccagtaccgtgagggaaaggcgaaaagaaccccggcgaggggagtgaaaaagaacctgaaaccgtgtacgtacaagcagtgggagcaccttcgggtgtgactgcgtaccttttgtataatgggtcagcgacttatattctgtagcaaggttaaccgtataggggagccgcagggaaaccgagtcttaactgggcgttaagttgcagggtatagacccgaaacccggtgatctagccatgggcaggttgaaggttgggtaacactaactggaggaccgaaccgactaatgttgaaaaattagcggatgacttgtggctgggggtgaaaggccaatcaaaccgggagatagctggttctccccgaaagctatttaggtagcgcctcgtgaactcatcttcgggggtagagcactgtttcggctagggggtcatcccgacttaccaacccgatgcaaactacgaataccgaagaatgttatcacgggagacacacggcgggtgctaacgtccgtcgtgaagagggaaacaacccagaccgccagctaaggtcccaaagtcatggttaagtgggaaacgatgtgggaaggcacagacagccaggatgttggcttagaagcagccatcatttaaagaaagcgtaatagctcactggtcgagtcggcctgcgcggaagatgtaacggggctaaaccatgcaccgaagctgcggcagcgacactatgtgttgttgggtaggggagcgttctgtaagcctgcgaaggtgtgctgtgaggcatgctggaggtatcagaagtgcgaatgctgacataagtaacgataaagcgggtgaaaagcccgctcgccggaagaccaagggttcctgtccaacgttaatcggggcagggtgagtcgacccctaaggcgaggccgaaaggcgtagtcgatgggaaacaggttaatattcctgtacttggtgttactgcgaaggggggacggagaaggctatgttagccgggcgacggttgtcccggtttaagcatgtaggctggttgtccaggcaaatccggataatcaaggctgaggtgtgatgacgaggcactacggtgctgaagtaacaaatgccctgcttccaggaaaagcctctaagcatcaggtaacatcaaatcgtaccccaaaccgacacaggtggtcaggtagagaataccaaggcgcttgagagaactcgggtgaaggaactaggcaaaatggtgccgtaacttcgggagaaggcacgctggtgtgtaggtgaagtccctgcggatggagctgagaccagtcgaagataccagctggctgcaactgtttattaaaaacacagcactgtgcaaacacgaaagtggacgtatacggtgtgacgcctgcccggtgccggaaggttaattgatggggttatccgtaaggagaagctcttgatcgaagccccggtaaacggcggccgtaactataacggtcctaaggtagcgaaattccttgtcgggtaagttccgacctgcacgaatggcgtaatgatggccaggctgtctccacccgagactcagtgaaattgaactcgctgtgaagatgcagtgtacccgcggcaagacggaaagaccccgtgaacctttactatagcttgacactgaacattgagccttgatgtgtaggataggtgggaggctttgaagcgtggacgccagtctgcgtggagccaaccttgaaataccaccctttaatgtttgatgttctaacgttggccccttaccggggttgcggacagtgtctggtgggtagtttgactggggcggtctcctcccaaagcgtaacggaggagcacgaaggttagctaatcctggtcggacatcaggaggttagtgcaatggcataagctagcttgactgcgagcgtgacggcgcgagcaggtgcgaaagcaggtcatagtgatccggtggttctgaatggaagggccatcgctcaacggataaaaggtactccggggataacaggctgataccgcccaagagttcatatcgacggcggtgtttggcacctcgatgtcggctcatcacatcctggggctgaagtaggtcccaagggtatggctgttcgccatttaaagtggtacgcgagctgggtttagaacgtcgtgagacagttcggtccctatctgccgtgggcgctggagaattgaggggggctgctcctagtacgagaggaccggagtggacgcatcactggtgttcgggttgtcatgccaatggcactgcccggtagctaaatgcggaagagataagtgctgaaagcatctaagcacgaaacttgccccgagatgagttctccctgagactttaagtctcctgaaggaacgttaaagacgatgacgttgataggccgggtgtgtaagcgcagcgatgcgttgagctaaccggtactaatgaaccgtgaggcttaaccttacaacgccgaagatgttttggcgatttgagagaattttcagcttagattcagagttgagtacgcaataatttgcgcagcagcaaggcgacaagcgacggaaaggaaggagcatactgaagtatgtgactgactttacgagcgcaggcaacgcagctgatgcgataaagaattgcgtactgagcacaaagaatttgcctggcggcactagcgcggtggtcccacctgaccccatgccgaactcagaagtgaaacgccgtagcgccgatggtagtgtggggtctccccatgtgagagtagggaactgccaggcatcaaacaagtgaagagcccatcctgtcggatgggctttttgcgtttctgtcgtccggccagcgtgccggtatgtctccccggtggcgctgcgcttaccggggctacggatccgacacggggctacgtccctgtggccggacaaagtgcgcagcaccgcctttattgcttcgcaaaatagcgtgacgaatgcttgtggcatggtcaaccggatagtgaatttaccggatgatacaagtcggaaaataattatcagcagctacgattaatattatttctttatttcagcgccattatattgtgccccggtaaaataatgatgcggcctcttcctcccacaaaataacgcgtttacgcttcagaaaaaatatttccgtgactggatacttcgcttccggatgtattgtggcgaacggtatgcttcttccctgtttttgtctaaatgagctttatcattaacactttgttaacttgatctggtttatatggcagcaaatttgatatacaaagggggatgattgcctgtatggatgctgcccgaaataccttgcgaaacatagactggttctcggctggcaaatgagaatagaaatgaaaatcctgcttaactggtcgccattgcgccagctcttcacttacattcaggagcgctttacctttctggtgctgctctgctggccagcgattatctggttgttctgtcgggtcggcgtgtggctcaccgataacgtttatgaactgctgggaaaatcacccgcccagtccttcactgtgtatctgcagccgtttatgacccccggcacgctgctacgcatctccatcagctgggtggtgttgctgttcattctcttcagtatggcgatggccttcacctggggtttacgtcgctttatgaatcgccataaataaaccattcggccgccgtaagtcgacggcccttcttaagcctttatgccatctcaccgatagtcttacgaaaacgcagcaacgcgatagtaaagaacactccgccgatagccagcaaggttaagaactgcggccagacgatggcgaagctggcgcctcgatacaatatcgcctgcgccaggctgacgaagtgggtggtcggcatggtcaacataatatcctgtaccagctgcggcatactttctcgcggcgtggatccgccggagagcatctgcagcggcagtaagaccaggatcatcagcagccccagctgcggcatcgagcgggcgagggtgcccataaaaatgccgatcgaggtagtggcgaacaggctgagcgccacccccagcataaacagggtaatcgacccttcaatgggcacctgcaaaatcccctgtaccatcagtatcagtgacaacccggacaccaccagcaccaccaggcccatcgaccagatcttggccatcatgatttcaaacggcgtgaccggcatcaccagcagatgctcaatggtgccatgttctcgctcgcggatcagcgccgaaccggtgaggacaatggccagcatggtgatattgttgatgatcgccatcaccgcgccaaagcgctcctgctcaaggttaggattaaaacgcatccttaccgccagctctaccggcagcacgctgttatcccgatagcgggcgataaaactgtttacttcgccggtgataatattctggatgtaaccgttgccggtaaaggcctggctcatgcgcgtggcgtcgacattgacctggatttccggctgccgaccggccagtacatcgcgctggaagttaggcgggatgttgatggcgaacgtgtagcgcccggcatccagcccggcatccatctcatcagcggtgatcagctccggctcaagaaaccagggacggtagaaagcgttaatgatgcgtgaagagagctgggatttatccatatcagcaaccgcgatcggcgccaggtgcagcgaaccgggcatcaccgtggccgaggagtacaccgacacggtaaacgcaaacacgatcagcgccagcatcgctttatcaccgagcaggctgcgcagctctttgacgccaagattataaatattgcgtaatccgcgcatcatccctcctgtttctgcagcagcagcacgctcaacccgagcaccagcggcaccgcaatcagtagcggaatgaatgagccccacaaatcgctaatattcagcgctttcgaaaaggtcccgcgggcgatagtcaggaagtggctggtcgggtagatttgcccaatccagcgcccgggaccttccagcgaggccaccggatcgatcattccggaaaactgggttgccgggatcagcgtaataatcgcggtaccgaaaatagcggcgatttggctcttcataaaggttgagatcagcagccccagaccagtggcgatggtgacatacagcagcgccgccagggtcagcgtcaggaaactccccttatgcgcgacgccaaagacaaagaccgacagcgcgcacagcaggaagaagttaaacatccccagtacgatataaggcagctgtttgccgagcaggaactcgctacgggtggtcggcgtcacgtacaagttgataatcgacccgagctctttttcacgcactacgctcagggcgctgagcatcgccgggatcatcatcagcagcagcgggatcaccgccgggacgatggccggcaggctcttcacatctggattgtagcgatagcgggtctcgatggagatgagcgaggtatcgcgctgcgggctgctctgccggccggccatctcctgcagccaggccagatgcatcgcctgtatgtagccgcgcacggtttccgcgcggttgggcatcgcgccgtccacccacacgccgatttgcaccggcgtgccgcgggcgatatcgcggccaaagttcggcgggatctctatcgccaccgccagctcgccgtcgcgcatccggcggtccagttcgtcatagctgcgcagcggcgcctgttcgataaagtagcgtgagccagcgagattctgcgaccagccctggctgctgagggtttgatcgcggtcgaggacggcaaagcgcagatcctcaacgtccatgctgatcccataccccatgataaacatcaggatcaccgtccccagcagcgccagcgtcgatcgtaccggatcgcggcgcagctccagcgcctcgcggcggctatagctaaacagccggcgaagactgaaggcctgccgtggagtcgtatgtccggaatgcgatgccacagcagacgtgggttcttctggtactggagaggacggctgggcctctttaagccaggcgataaacgcctcttccaggctgtttgaaccgcgctgctcgaccagcgcctgcggcgtatcgctggccagcactttgccggcgtgcatcagggagatacgatcgcagcgttccgcctcattcataaagtgggtggagataaaaatggtcacctgatcctgccgcgcgaggtctaccatcagctgccagaacatatcccgcgccaccgggtcgacgccggaggtcggctcgtcgaggatcagcatctccgggcgatggatgaccgccaccgctaacgacaggcgctgacggatccccagcggcagatcggcgggaagcgcgtcttcaacctcggtcagcataaagcgctcgcacatttccgccacccggccggggatttcgccgtccggaatatggaacaggcgggcgtgcagctcgaggttttgccggacggtcagctcgctatagagcgagaaggcctgcgacatatagcccacccgctggcgggtggcgatatccttcgggtcgaccggctggccgaacagccaggcttcaccttcgctggcgggcagcaggccggtgagcatcttcatggtggtggatttgccgcagccgttggagccgaggaagccgaagatttcaccgcgggcgatgcggaaattaacgtggtcgacggcaacaaagttgccaaagcgcatggtcaggccgcgcgcttcgatggcgatctcttcctcacggctgtcgcgcggtgggataactaccgccctatgcgcctgacgctgtgcttctggcagcagggcgataaacgcctgctccagggtctggctgccggtctgggctttgagctctgcggcgctgccggtcgccagcacctcgccggcgttcatcgccaccagccagtcaaagcgctcggcctcttccatgtaggcggtggccaccagcacgctcatcgccggctggcgctggcgaatactgtcgataagctcccagaactgcgcccgggagaggggatcgacgccggtggtcggttcatcaaggatcagcaactgcggatcgtggatcagcgcgcagcacaggccgagcttttgcttcatcccaccggagagtttaccggcggggcgatcgcgaaacggcgccagcccggtactctgcagcagctcgttgatgcgcagttcgcgttcggctttatcgtggccgaacaggcgggcgaagaagtcgacgttttcatacaccgagagagtgtgatagaggtttttccccagcccctgcggcatccacgcgattttcggacacacctcgcggcggtgatgcacatcgcgcatatcgccgccaagcaccatcacgttcccctgctcgatggtccgcgccccggcgatcagcgaaagcaggctcgatttgccgacgccgtccgggccaatcaggccaaccatacgccgtgccgggatcgccagactgatatcgcgcagcgcgatggtggcgccaaactgctgaccaacgtgttccagcagggcgacggggggcgaggtatcctgcggcgttagtttcattgcggcaacctcaccgccagggcttcaggccagggttgttgtttatccagccgtacgtaagccataccgggcaggccggttttgacatactccaggtgctgcgccagcagctccggcgggatacgcgctttgacgcggaacattagcttcaggcgctcgtcgctggtctcgaccgttttcggcgtgaactgggcgacgctggcgacaaagctgatattggccgggatcaccagatccggcgcggcatcaaggaccaagcgcgcttcgctgccgagcgccagcagacctgcctgttcggtgggcagaaaaaaggtcatatagacatcggcgagatcgaccatgttcagtacccggccaccggcggccaggacttcgcctggctcagcgacgcgatactgaatgcggccgtcgcggggggctttcagctcgctatcgtcaatatcggcgaggatccgccgctcggtcgcctgggaggcttcgacgcgggtttgcgcctgaataatgctggtgcgggcagcttcgatggcggcgcgggcggcggagacctgggctttcgccgattccagcgccgcgcgggcgctctctgcggccgcgcgatcgtcatccagctgctgggcagagacggcgccacgctgggagagggtgttggagcgaacatggcgtttcgccgtggaatccagctccgcctggcgctgcttcactaccgcttcgctggcgcgcatttcactttgtcgctgatcgagcaaggctctggcggccaggaccgcgctttccgcctccttgatttgcgcggcggcttcaagacgctgctcgttcagtacccgggtatccattctcgccagcacctctccctggtgcacgaactgaccctctttgaccagaatggtgtcgatacgcccggcgattttactggcaatatcgacttcggtggcttcgattcggccgttgctgctggcaaaccccgccgggagtcccggcgggcgcagcagccaccatgcggcggcggcgagcaccaccagtaagccgacaaaataccctgcccaacgtttctttattttgtccatacgcgactcgcttgattccctgtgctgagtggtgcgcgtgtttcctccggcgggcggagcgtccttcttgcgaaggacgaaaaagtggagggagggccgctgacgccgcgctctgccgcgccgatgcgcagccgctcgctgggctacttatgtgatcatcatcagagatcctggccttaatgaaacacgcatagtgagagctaccgttaacgcgatagtaacagccggggcgatattgtccatacgaaatacagggtcttgtcggcgtgttaacaaaattatccgcacagggagtatttcaccatctcagaacagcaccggcagccccagcccgcgcttcacctcatgcagcgtctgctgcgtcagctggtgggcgcgttcgctgccctggcgcagcagctccagcagcatccctttatcctgaataaaagtggccctgcgttcgcggatcggcgccagtagcgtctgcaagcaggtctccagctcattcttacactggcgatcgcccagcccgccgcgctgatagtgggctttcatctctgccacccgcgccttatcgctgtggaatgcatcgagataggtaaacaccacgttgccctcgacacgccccggatcgctgactctcaggtgcgtcgggtcggtatacatcgcgctgaccgcgtggtggatctcctcctctgtggccgataacgtcagcgtattgcccagcgatttcgacattttggcgttgccatcgacgcccggcaggcggctcacttcgctgagtagcgccttacagtggcgcagcaccggctcgccggtgaggctattcatcttgtggacgatctcgttggtctgctcaatcatcggtagctgatcgtcgcccaccggcaccagctcggctttgaaggcggtgatatcggccgcctggctaatcggataggcgagaaaacccaccggcagcgagcgggcgaatcccttctgggcaatctcatttttgaccgtcggattacgttctacgcgggcgacggtgacgatattcatatacagcgcgctgagctccgccagcgccggcagggcggactgcaggcaaatagtggtgagcctggtgtcgatgccgacggccagataatcggccatgacttcgaggatatggtggctgattttttgcggattgctgccgttgtccgtgagcccttgcaggtcggcgatcaggataaattgctggtggttatgctgcagcgcgacgcgctggcgtagcgagccgacgtagtggccaagatgaagttggccggtcgggcggtcgccggtgaggatggtttgtggatggttcatcagggactccttatcagactgttcagccgaaagacgtcctgaaaacaccaaagccgccttccggcggctttgaaaatggaaacgtgtatcgtgccgcctgttatgcaggcagccaccaacggcggggataggtaacgataacgtttctgttcatagggagtatcctgccacggaaggggctggaggcgcaatcaaaaatcacatacttttcctgatgttatttatgtgattgtttttcggtaaataacgaagcgagaaaaatatattttctctgcgacccgaacattattctggaacaacaaactatgttgcattttttttgtgaaaaagctcacgccacaggattatagtattattatccatatttatagctggatattacctgtctgctgttacagcttgtgtttattctcttctaaattattaacattattacaatttctatctatttttccgctttgcgtcatacccctgtctgactacaacgtattgaggctaattattatgcataaacgtctggtcgttaatattttttcatccttgctgttgggggctgcgcttatttccgcgccggtatatgcggcggaaaaaaccgtagtcaatatttcaaaagtggacggcatgccatggtttaaccggatgggtgaaggggtagtccaggccgggaaagagtttaacctcaacgcctcccaggtagggccgtccagcaccgatgcgccgcagcaggtgaaaattattgaggacctgattgcacgtaaagtggatgccatcactatcgtgcctaacgatgccaacgtgctggagccggtattcaaaaaagcccgtgacgccggcatcgtggtactgaccaacgaatcgcccgggcagccgagcgccaactgggatgtggagataatcgataacgagaagttcgctgctgaatacgtggagcatatggccaagcggatgggtggcaaaggcggctacgttatctatgtcggtagccttacggtaccgcagcacaacctgtgggccgatctgctggtgaaataccaaaaagaacattacccggacatgcatgaagtcacccgccgaatgccggtggcggaaagtgttgatgattcccgccgtaccacgctcgatctgatgaaaacttacccggatctgaaagcggtggtctcttttggttcgaatggcccgattggcgcggggcgcgcggtgaaagagaagcgtgcgaaaaataaagtcgcggtctacgggatgatgatcccctcgcaggcggcctctcttattaagagcggcgatattaccgaagggatcacctacgatccggcgacagccggctatgccctcgcggccgtcgccagcaccctgctgaacggcaaaaccattgagccgggatttgaactgaaagagctcggtaaagcggaggtcgatagcgacaagcatattatccgcttccataaagtgctgctggtaaataaagacaatattgattcgctctactaatccaccttccggggcgccagccgccccggcttaaccagccaggggatgctatggaacctttcctttcccttcgacacgtcagcaaaaccttccacgccaaccgcgcgctcaatgatatcagcatcgactttatgcccggagaagtgcactgcctggccgggcagaacggttgcgggaagtcgacgttgatcaaaattatctctggcgtctatcgcccggatgagggcgcagcgatgacgctgggcggcaagacgtggcccaaactgacgccagcggcctctgtcgcccatgggatccaggtgatttatcaggatctgtcgctgtttcccaatctcagcgtgtgggagaacattgctataaaccactatcatcgcggcgtgctggtgaggcgcagcgaactgcgacgcagtgcggagcaggcgatgcgcagtattaacgtctcgctgccgctggatgccgccgtggaatcgctctccatcgctcgctgtcagctggtggctatctgccgcgcgctggcgcaggatgcccggcttatcattatggatgaacccacggcctcattgacccatcaggaagtggagggactattgcatgtggtgcgccagctgcgtgagagggggatctgcatcgtcttcgtaagccaccgtctggaagaggtcatggccgtatcggaccgcatcagcgtgctgaaggatggcaatctggtcggcaccttgccggcggcagaggtaaccacccgccggctcggttttctgatgacgggccaggagtttgactatcaggtgcgcgatctgtggcaggggcagggcagtacgccggtgctggaggtgcgcaatctcagccgcaagggggaatatcataacgtctccctgaaggtcgaagccggagaagtagtgtcgatagtcggcctgttgggcgccgggcgaacagagctgtgcctgagccttttcggcatgacccgccctgacagcggcgagatcctgataaatggccacccggtgcggttgcgtagcaatcaggacgctatccgccacggtatcggctatgtctccgaggaccgtatgtcgcgcggcctggtgatgagtcagtcgattgaaaacaacattatcagcaccgtgtttcataaagtgaaaggcgcttgcggactattgagtgatagtaaagctcagcagctggtcgcaagaatggtcaacgcgttgaccattaaggcgccggatacgcatctgccggtgaataccctctccggtggtaatgcccagcgcgtttctatcgccaaatggctggcgatctctcctaagctgctgctcctcgatagcccaaccgtgggggtggatatcgcaaacaaagccgggatctatcatatcatcagcgatttggctgcccatggtatcgccgtgctgatgatttgcgacgagattgaagaggcgtggtaccagagtcatcgcatcctggtgatgaagcagggcgagttgacccatagcttcctgccggacagcagtacccagcagcagatagcggaggtggtcaatggctaatctgttgaaacgacatgaattctggttaggcatgttcattattgcgctgtgcctgctgctgggctggcgcagtgaggaatttttcactttcggcaatatttacgacctcgctaataactatgcgatgctgaccattctcgcctgtggtctgttcgtggtgctgatcgccggcgggattgatatctccttcccggctatgaccattatcgcccagtacggcatggtggtgatgctgcaaaaagtaggcggcaacttcgcggtggcttttgtgcttgccggcggcatcggcgtgctgctggggctggtgaacgcgctgttggttaatcgtctgcgggtgccctcgatcattatcaccatttctacgctcaacattttctacggtttgctgctgtggttaagcaaaggtgtctggctctacgacttccctccgtggtttgaaaagggggttatgctgttcaaatataccgatgccgatggttacgattacggcctggggctgccgctgctgacgatgatcgtcgtggtgctgttgaccgcgtttatcatgaatttcaccaccgttggccgcaagatctatgccatggggggcaaccgggaatccgccagccgcgtcggcttcagcgtgctccgcctgcagctgttcgtttatggctatatggggctaatgtcgggggccgcaggtgtcgtgcaggcgtggacagtgatgaccgttgcgccggattcactgctgggctatgagctgacggtgctggcggcggtggtgctgggcggcaccagcctgattggcgggcgcggaactctcaccggtacgctgctgggggtgattttactggcggtgatgcagaacggcctgaacctgctaggggtctcctcctactggcagaccctgatcactggggcgatcatcgtcgtcagcatcagcgtaacggcatggagccagcatcagaaccggagcttgttatgaaaaaatcgtggcgcaacaacgttgagttttacctgatcggcctgctgctgctgatggttatcgcctttagcatcgccatgccaaacatcttctggtctgtcagcaatttccagtcgattgcctcgcaaatgccggtgctggggatcctggcgctggcgatggccatgactatgctttgcggcggcattaatttgtcaattatcgcgacggctaacgcctgctcgctggtgatggcctgggtggcgacgagctatccgcctgggggcgctaccgcgctggcgacgctgctggctggcggaggggcggcgatgatcattggcctgtgcaacgggatattgatcgccgggatccgcgtttcgccgatcctggctacccttggcatgatgaccctgctcaaagggataaatattctgatcaccggcggcagcgccatcgctaactatccgcagtgggtgctgtggctgaatcacgcccagtggttcggtattccgctgccaatgtggctttttgcggtggtggcggccgggctgtgggtgctgctggagaaaagcccgctgggtcgggcgatcatgttgatcggatccaacgaacgggcgacccattattccgggatcaatacccggcgggtgttgatgtgggtatatgtcatctcggccctgctctgcgcggtggctgcgtttctgatgatgtcgaagctgaactcagccaaagcatcttatggggaatcgtatttgctggtgtcgatcctcgcggcggtgcttggcggcgtgaatccggatggcggtagtgggcgcatcgttgggatggtgctcgcgctgttcctgctgcagattattgagagtgggttcaatatcctcggtatcagcccctatctgacgatggcgctgtggggcgtattgctgctgtgctttatccaggcgcgaggcatgctgggactggagagagccgggtaaatgacccgtcctcgggggtgaagacgggatagccagttattcgctacgcaaatgcaccgccaggccgctttgccctggcgccagctccgggcgcagcgtcagcgacgggatcagataatcgccatgattctgccggcggaatggaatgggctcggtttgccacagcgtgtccagccgctcggccagggcggcgcactgatcggcgaactgcccggcatcggttttatccgtgcggtagaacaccagcggcggaagcacctcaaagccggggtagaacagcataccgtgctgaatggggaacaggatgtcgtcgatggggccattgatcccgcgtggtgaatagtgttccgcccagccgccggcggtgacgatcagcatcgcccgcttgccgacgaaagtgccttccccgtagcgatcgccccagtggcggtcgctgtgctccccgacgccataggcaaagccccaggcgtacaccctgtcgatccagcccttcatgatggcgggcatcgagaaccaccatagcgggaactggaaaatcaccgtatcggcccacagcagcttttcctgctcggctacgatatccgcactttgggtgccctgggcaaaggcctgtttggaatcgagggtcggccgccagaactcgccgaccggcggcgcgccgctgtcgtctgcgtcatacccggccttccagcgcatggcatagagatcggaaacctgcacttcatgcccggcctgctgcagatggcggatggcgaaatttttcagcgcgccattgagcgagcgcggttccggatgggcgtaaatcagcagtactttcataatatcacctctggcgtatggagagctgcagagtaggaaagctgacgctatagtagaaattaattacttaaattcccggtatagtcgtgattaatttacagcgtctggatctcaatctgttgcgcaccctggatgtgctgcttagcgaaaacaacgttacccgggcggcgcagcggctgaatctgtcgcagccctcggtgagtattcagctcgccaggctgcgggagattttcgccgatccgctgctgatgccgggcccgcgcggcatgcagcccaccgcccgcgccgatgagcttcgtcagccgttgcgcgctgcgttagccgcgctggagcaggcggtggcgccggtcagcccttttgatccggccacggcggcggagacctggcgggtggcggcgacggactatatggcctcggcgatcctcctgccgatgctggctgggttacgccaggcctctcccggcagtcggctggcggtattcgaactgcagccggcgcggctggagcagcaggcggccagcgatacagtagatcttttctttcatacccgcgagggcgcgccgccggggctgcatcagcgcctgctgtttcgcgaacgctacgtgctggctggccgggcggaacattcggcgctgcggcctgggcttagcctggaaacgttctgtcagctggagcacgtgatcgtctccccggacgggggcggcttcagcgcggcgaccgatatcgcgctggcgaacctcggactgatgcggcgggttgtcctttccgtgccacatttcctgtttatgctggagaccctgcgcaatagcgatctggtggcggtcctgccggagcggctggtgcgcgggcagagcgggctggtggtcgtcgagccgccgctggcggtcgccggctttgagatgctgatgctgtggcacgagcgctggcaccgcgacccggcgcatcaatggctgcgtcagttcattgtgaattcactggaggaacagacatgctgagtggactgaatcacctgaccctggcagtcagccagctggcgccgagcgtggcgttttatcagcagctgctgggcatgacgctgcatgcccgctgggacagcggggcttatctctcctgcggcgatctgtggctgtgcctgtcgctggatccgcagcggcgcgttactccgccggaagagagcgactacacccattatgcgtttagtattagcgaagccgattttgctagcttcgccgcccgccttgaggctgccggcgtggcgatctggaagctgaaccgtagcgaaggtgcctcgcactatttcctcgatcccgatggccataagctggagctgcacgtcggcagtctcgcccagcgtctggccgcctgccgcgaacagccgtataaggggatggtgttttttgatcagtgaagctgcttcgcagacgctagatcacccgtagccccggtaagcgcagcgccaccggggagaacaggttaaattcactccatcgccaccttcaccgcttctcccagcttcaccatcaccgctttatgtttctcggtcggcggcagggcgcagttgatcctgacgcagttgcgatacttgcccgctgccgaaaacagcgagcccggcgcgacctggatcttcagccggcacagctgcttggcgacgcagaccatatctacctgctccgggagctcaacccacagcataaaaccgcccttcggccgggtgacgcagatcccgcaggggaaaaattcccgcagccagcaggtgtagatctcgatattgcgctgatagatctgccgcatccgccgcacgtggcggtggtagtggccttcgcgaataaaattacaggccgccagctgagtggaagggacgttggtcccgctggcggcgtacttcatctgtagcagcttgtcgtagtagcgcccgggggcgatccagccgatacgcagcccgggggcgatggttttggtaaaggagctgcagagcatcacccggccgtcgatatcccaggagtggatcgtgcgcgggcgcgggtattcggtggccagctcgccgtaaatatcatcctcgaaaataacgatatcgtagcgttgggcaaggttcagcaccgcgcgcttgcgggcgtccggcatgataaagcccagcgggttattgcagtttggcacgaggatcacccctttgatcggccactgatccagcgccagctccagggcctcgatgctgatcccggtttccggatcggtggggatctcaatggtctttaatcccagcccgcgcagcatctgcatggtgccgtagtagcagggggattccacggcgatgatgtcccctggctggcacaccgacagcagggccagcgacagcgcgctgtggcagccgctggtgagcaccagatcgtcggcagttaccaccgatccgccgtcgagcatcaggcgggcgatctgctcccgtagctcgcgacgcccggccagctcgtcatagttcaacacctcagtgaggttgtgctggatagcccggctcagttcacgccagatgggcttcaggcttggctgcgtcacgtccggcgagccacccccaaaggggatgatcgatttatcgtagcgggcgtcaagcatggtcagcacctgatcccactgggtgatctccaccgggcgctggaccggacgcgacatcggcggcaccggcggctgggctttgcgcggggcgacgaaatagcccgatcgcggctgcggcacaatcatctgctgctgctcaagcagctgataggcctgctggacggtgctgatgctgacgccgtgctcctggctcaggctgcgcaccgacggcagcttttcgccatggcgatacaggccctgttcgatgcgttcggccagcagcgtagcgagatgttggtagcgggtcatgctgtatccttaattgccgccatacagatggaataaccagtacagatgggcgtaaaaattgggctctggtgtacgttttagctaatctgtatgttaaagaaaagcgttttgtgaatctgtattccttacccccaaatccgtgaagataaagcctctggcaaggtgaggaggtagaggatggaatttcacgagaacagggcaagacagccatttatcggtttcgtactgctggtgcggtttatcaaaaaatggtggcttcaggagcaaacgcgcagagttttgcagcaaatgagcgacgaacagctgaaagatatcggcctgcgtcgggaccagatcaattaaaacgtgcggttttttacaggcaaaccttcttcattatcccggtgagcgcaaagtgccgccgggatacattcacgaaatttatcaattgatgcggcacgagcttccgtttcttgatacttaccctgataagtattattttcttctcaataatgagaggaagacccgtgactgaagacgaactgtttgcccgccgcccgctggggatgcggatggctatggtggtgcgccagtggcgcgccattattgactccgctatcaccgataccggactcacccagtccagctggacggtgctgatgcaactgcatcagctgggagacaacgtctcggtcagcgaactggcggaggtgcagggcattgaactgccgccgctaatgcgcaccctctcattactggaaaagcagggctatctggtgcgttccacatcgccatatgacaaacgcattcgcctgctgacgctgaccgctgaggggcgggctattctggaaaaactgagctgcgtgatcgagacctatcaggagcgcgtaacccagaccatcccggaggccgatctcgccaccttcagcgccacgttaaatcaaatcgcctgccgtttgcggaatatccgcgaagaagataacaagatctaacacactatgatgacgcctgaacaaaaatttgcccgctgggtacgggtgagtattgccgcttttctgggaatattcgcctggtttatcgttgccgatatctggatcccgctgacgccggactccaccgtcatgcgcgtggtgaccccggtttcgtcgcgggtctccggctatgtctcgcacgtctacgtgcacaacaacagccaggtgaaaaagggcgacctgctgtatgagctcgacccaacgccattcattaataaagttgaagcggcgcagatcgccctcgagcaggcgaaactgagcaaccagcagctggacgcgcaaatcgccgccgcccgcgccaacctgcgcaccgcgcagtacaccgcgcgtaacgataaggtcaccctcgatcgctaccagcgcttgagtacgatgcagaacgtctcgcagtccgacctcgataaggtgcgaaccacctggcagaccagcgagcagtcggtctcggcgctgaacgcgcagatccagaacctgctgatccagcgcggcgagcgcgacgataagcgcaacgtcaccctgcaaaaataccgtaatgcgctggaggaggcgcagctgaacctggcctggaccaaagtgcgtgcggaaactgacggcatggtcagcaacctgcagctgaacccggggatctacgccaccgcggcgacggctgtgctggcattggttaacaacaacactgacatcgtcgccgacttccgcgaaaaaagcctgcgccacaccgcggtgaataccgatgcggcggtggtctttgacgccctgccgggtcaagtcttcccggcgcacgtgaccagcagcgacgccgggattctggcgggacaggaggcggtgaacggccagctgtcgcagcccgagcagtccacccgctgggtgcgcgacgcccagcggatgcgcattcacgtcgcgctggatcagccgctggacaaaccgctgccgaccggcgcccgcgctacggtgcagctgtacaatagcgagggaccttttgcccgcaccttcgccggcctgcagatccacctggtgagctggttgcactatgtctattaataccctggcgcatgtctttaccccgcacggcaatatcgtctacacggcgaatgattttcgccagacggtgcgtatcgccgtggccgggaccattgcgctcagcatctccaccttctacgacgtgcagtacggcgtatttttcgtcgtttatccgctgatgctgatgtcgctggtgccgatgttcaacctgcacgtcgcccgccagtttatatttagcgcggcggtaaactgtgtcgaaatggtgctaattgtcggctatttgtcgcagtggccggtgatcatgaccctggtggtgtttgccctgtacgtgatgcgtttccgctttatgagccagggaccgctgttcctgttgggatcgatgggggtggtgtgccagagcacgatgctcaattttatgagctatcccaccagcaactggcacaccctgatgttctccaatatggaagcctgcgtgatggccgtggcgctgagcgcgctgctgcattacctgatcccggacgtcgaaccgcgcaagccgccgccgcggattgagaaagacgccgcccgcatccgtcatgagtcgctgctctccggtacggtagcgacgatcatctttgtggtgtttcagatctgcgatctcagcgactcgctgtcggcgctgatggccgggatcctgatcctgttcccgatgcactatcgcggggcggtgatcagctcgatctggcgcgtcgtcggggtggtgctggcctgtctctatatactggtggtgcagctgattatctatgatttcagcaaccacatgatcctgatgatgccgctgattggtctcgggctggccttcagcgcccgcctccacgtgatggagaaagtgggcgccggggtgggcttcgccagcatcactaccatcggcattatgttcggccagaacctgcatccgtatcaggatctggtgttcagcgatctgtaccgcatcacctcggtgacggtctcgctggtggtgacgctgaccctggtttttctcatgcaccgcctgctgaactgtttcgcggcgacgcgttttgtggtgagcgattaacctgccggtgggaaggtggcgagacagcgccatgcttccccgttctgctgatacagcgccgccgtctgttccgggacgatccagcctcgcgcatcggcttccgtcccctccagcaggatgcacagcccgcagccgctgcgcagctggcggggtatatctttgacctcgaaggccactcccgccgcctgcatggctttgcgcatccgcaccacccccaccgtggagtgaaataaaaacagaaacgttgtcatccgcgcctccgctggcgctgtccgatcagcgccgcgccgatcgccccggcaaactgggcgtcgggatgggttgtcaccgccatgccgacatggctttccagcatccgggcaaaggcggcgcagtggctgacgccgccggtaaacagcagcggcccctgcgccgataagcggccgataaagttcgcgctgcgccgggccatggcgttaatcaccccggccagaatcgcctccggcgcgacgccggccgaccgcaggctgatgacctccgattcggcaaacaccgtgcacatactggtaatggcgtgcggttccacgccgtcggtaatggcgtccagttgttcgacgctggcgccgagggtgcgtgaaatgacttccagaaaacggccggtgccggcggcgcatttgtcattcatcaggaagtcgctgaggttgcccccggcgtccagctggataactttgctgtcctggccgccgatatcaatcaccgtgcgggtgtccggcgccagcaggcgggcgccgaggccgtgacaagagatctccgtcacctgcttatcggcaaaatccaccagctggcggccatagccggtgagggttaaaaaaggcgtctccgtgaggccagcgcgcagtgtctcccaggcctcgtggatggcgtcggcggggcgaaagggagtggggcagaggaagcggcgcacgatgacgccgtccgccagcaggatgccttttgtggcggtggagccggaatcaatgccaaccgtatagttcacgccagctccttacagcatttcgataaaggcggcgacgcgggtgctgagctggccgaggtccgctgtcgaatagtcggtttcaatcgccatgtaaggaagatcgtgctgttggcgcagatggcgtttaatcgccagcgattccacggcataggtatggcaggcctgcaaaatgacgtcgatcaccccgtcggcctgatactcctccaccatctggctcagcagctgcagacgctggtcgttgggggagatacaggagcagccgatggcgagatatttatcggttaaggcgtcgtagacgtcgccctcttccgccacgcagcgctcggtcgctttcgcgccggtgcagttctcatagccgaccacccagccgccgttttcctcgatggcgcggaccactttttccgccgcgccgccgatcgggcagccggtgatcaggatccgcggacgaggttccagccgtttaccctgctgccactcctgatggatgcgctccgccatggcatgcagttcatcaatcagggcggttttgtcgaaacgaaaagtggcgccgtacaccactttcaggatgtcgccgccgctgagcgccggcggattgagctgcccgagacgataaaagtgggccagcgcccggcgctcgcgatttttcaacacgatggcttcgcgcagcgccgcctcgctaatcggcgtgccaaaccgggcctcaatcacctgctgcaggcgcaggatctccgttttccacagtgcgcgcgaggcggcatcgctggcgctgttcggcaactgcatgacgtggaccgccttgaactcggccatgtactcatacattttctttttgccgtcgcaggtggtttccccaaccaccaggtcagagaaatagaagtagggacatttatcggttttgccgaagccgtagctgcttttgataagcgggcagaggttgcgcgggagatctttttccgcttcctcgatggtttcatcggaggttgagcacagcgagacgacaacggcgcccgccgccatggcgatctcctggggcataaaggtgcagtaagtgcccaccagcggtacgttctgctctttaagatccatgacggtgagaaagcccttctggcgagcttctgagaactggtcaaaaatggcgggtagatcggtgataagcgacatggttttccttccccgtacacgggagatgctgaaagagtcgccattatagccatgatgtatgcagggttttattgatctcctgcgtctgtacgcggtgttaatagacctttttcaaatccatctcttcctggatacgctcgctccatgcctgatgggtgcggatggcctcttcgataccggcgttgtaaaacagcggccccagctctttggcgataaagtcgacgaaaaattcggcgtcaaactgctccagttcgaggtcgaaggtctctgcgcagtacttgctgagcctgtcgcgcagcaggtcgcgctgcgcctggctgagttcaatgtcattcatgatggggctttctccgtaaaagggctcacgactgccgggcttcgatcaccgcttgtccgcgctggtggcgtaacagtccggccaggcagcaggcggcgacaatcccggcggccaccgccaacaggtggaaggggagtctgccgccatggaaccacagccagcgcgcgccttcaattgataacgcgctgacgctgaggatcacgatattcagcgaggcggagaccgtgcctttcggcaggtcgttggaaaagagggtaaagcgaaacagcgtcgggaaaatcagcccgatgccgaaggcgtagaagcaggtgccgagcaccgaccacagccagacgtggggccataccagattgccaacgatcaggatggccaggccgagcatctgtaccggcaccgcgctgaggacaaagcgcgggcgggtagggtcttttacccagcgcgccaccgacaggttggcgatgataacggcgctgaagaccggcacctggctccaggcgaactcgctggtggtcagtccgccggcgtccattaaaatcactggcgataccgccacccagctcatcagcggaatatagctcagcgacagcgtggcggcgccgagtaaaaagatgcggttgcgaaagacgttgcgaaaatcgcgcagcacgcccagggggctgaacggcacatcgccgcggcgcaccgtctccggcatggtcaacagcaggccgagccaggccaccaatcccatggcggcgataatgccgaacagcgctttccagtgaatgaaatgcatcagcgccgcgccggagagcgggccgacgatcggcgccaccagcacgacggaggtgatcactgccatcagcctgatcgaccttttttcctcaaaggcctcctgtacggtgacgtagccgacggtggcgataaagcagatgctggtgccctgcacgaagcgggtaatcaggaactgcgtcatggaggtagtgaacagggtcgccaggcatgcgagggtgaaaatcagcgcgccggtgagcagcaccggacgccgtcctatccggtcagagagcggccccagcagccactgtagcgccatgccgccggccatatacaggctcaccgaggccggagccagcgccacatcagcattgaaatcccgcaccacgtgcaggatccccggctggatcagatcggtagtgagataagcggaaaaatcatacagaattaacgccgccgggaagaacagcgcggcggcgtgtcggctcagccagtgggaaatcctgtgcatcatctcgccctccctgtggaatatttatcagcgctattgttcggatagtatcattgctaaccaatatgcagatgcagcagcgaggggatctgcgagagcagccacaacaacaggccgatggttccccccaccagggtaccgttgatgcggatgaactgcagatctttaccgatattgagctcgatctgccgcgacatatcgcgggcgtcccagctcttcactgtgtcgctgatatggcgggtgaggaaggcggcgaactccggcgccacccggtgcgccgcctgctccaggtgttcgttaagcgattcgcgcagcgcgtcgtcgcggagtaaggtttcaccgaaccactgccccgcctcggcgatacgctgcttaatacgtgagtcgtcgctgctgatatcgttttttacccagccgcgcaggtcgccccatacttcgccaagatagtggttaaaggtctcatcattttttagccaggctttgatgttatcggccttctgcgccatatccgggtcggatttcaggttatcgataagcttttgcacggcgcggtcaaaagtctgacggatctgatgcgtacggtcgtgagtcacctcgtccagcagggtattcaccgcgtcggtgaccatctcagcgctgtgctcgccgagccactcggtgggtaggagtttggccttcagcgggtgttcggtctccagccagtgtacgatgccgcgggcgataaaggcgcgggagctgtcgcgctgcagcagggcgatcagttggtttatcagcgaatcgagcagcttttgatggcgattgtcgcgggtcagtccctccagcatcatggcgctggtctgcgtcaggtcgaccttatcgatagccttatgcaccgcgcgtcgcagcagacgttgaatgcgcgcgtcatcggtcagttcgagaaaaccgctcatcacctgcagcaggtgctggccgacccgtcgggcgttctccggctggctgaaccagttgccgagcatcagggctggctgatagcggcggatcagcgcgaccagcgacggggtatcaaggaacttttcctcgacaaagcggccgaggttgtcggcgatgcggtctttattgcgcggaataatcgccgtatggcgggcgacaaagggcagcggaatacggcgaaacagagccacgaccgcaaaccagtcggccagcgccccgaccatcgccgcttcggaaatagcttttagcgcaccgacccagggcgacggtggtagcgcgagggtagtgataaaaatggcggctgcaatcagcagcagcgacagcgccagcagtttggcgcgtttcagttcagcgagtttttccatatgcttaagcatatagcctgacggcgaggtcgtgcaaaaatcgccagataatccccaggccgaagagcatcaggatcgcccccgccgcccgctcgactcgccagacgatggcgcccaggcggcgctgtatctgcggcagagcaatcgcgctcaccagcagtaaatcccagaagaacaccacgctgaccatccacagcccgctcaccgtttgctgaagcagggtcacagccggcccgagcagggaagtcatcagcgccagataaaacagggcgtttttggggttgagcagcgatgaccccagccccagcagcagctgcctgccgaaccccggacgcgctgcgcgaacgctctccatcgccagcgtcgcgggacggctgcgtatcagcaggctgccaatccacaataaatagcccgcccccagcagttcgatgagcaaaaaaagcagcggcgcctggcgcagaagcccccagccgacgatggcgagcacaatatacagcgcattgcctgcggcgatgccgagacacaatccgatgctgccgcggatccggtagcgcacggcgtagccgaccagcagaaaaaaatcagggcccggactgagcagagcgacaaagtgggacagggctaacgccgggaaggcggcgggaaagagcgtcgataaggtatgcatagtggcctcgataatggtgcagaggccaccctacgccaggtggcgtattacttattgtcagatattgatctgctttgcgcatactgccgcggcgtggcggcggtatagctgacaaaggttttatggaaatggctctgatcggcaaagccagcctgatagccaacgtcggcgataggatccccggcgcgtaagcgcgttttcgcatattcgatgcgcgccatgttgatcaaactggcaggcgtcaggccggtatcttgtttcacggcgcggataacggtctctttacgaagcgcgctgtcgtgggccagcttatccagcgacggcgacgccggcagatccatcgccaggcgctgaaacagcagggcgctggcgtgatgtggcgcctgcggcgcggcggcgcacagcggcagcgcgtgcaggagttgcgccagccgggcgggcagttgttcaaggctcccgcggttcatcagggcgacaacctgctggaaactggcaaagagagggctgtcgcgcagcagcggctgcggcgaggtgatactggcgccagggggaatatccgggcgctgcgcgcggcaccatgtcgcgtccaggtaaagcatgtgatagctgcgcggcctgtcatgcagcggattacagctatgcggcgcgtgcggcgggatcacgatcagatccccgggctgtagcaggtactcctggccagcgcacaggcagcgcgtttccccctcgataatcgcccccaccgagagctgggggtggctgtggcgcttataggcctggtggctgcgccaggtgctgcgcagctccagccacggcagacgatcgtctcgccagaaggtttggggaatatctcgggtatggttcactgctttggcctttgctgcggggataagccgtttatagcatgctgcgccgaggctgtcgcccgcctggatttgcgtaccgcgtcgaaaaaggatgtcacgcttgcagtccggggaaatatgttttcgtagcggaatgtaaaatcccggtttccggggtgccagagacattcatgggatgtagagtccctgcaggataagcaggcagggatgagccgatggcaaagggcaccacctcgacgccgcatgatgcggtgtttaaacagttcctcactcaggccgacaccgcgcgcgattttctggcgatccatctaccgcctgcgctgcgtcagcgctgcgacctcgataccttacagctggaatcggcaagctttatcgaggagagcctgcgggcctggtactccgatgtgctgtggtcactcaaaaccgcgtctggcgagggctacatttatgtggttatcgaacatcagagctcgccggatgcgcagatggccttccgcctgatgcgctacgccatcgccgcgatgcagcgccatcttgatggcggtcatacaaaactgccgctggtggtgccgatgctcttctatcacggagcgaccacgccatacccgtggtcactcaactggctggactgttttgccgatccacagctggcgagtgagctttatatctcgccctttccgctggtggatgtcacggtgatccccgacgatgagatcgttcgccaccggcgcgtggcattactcgagctgatacagaagcatattcgccagcgcgatttaatgggcattgttgagcaactgacgacgattttacttagcggggacgctaatgacagacagctaaaaacgctgtttaattatctgctgcagactggcaacgcgcgccgctttggccggtttatccacgaagtggcgcaacgggttcctcagcacagggagagattgatgactattgctgaaagattacaggaagtgggccgcagaaaaggcaaacgggaaggccggcttgaaggcagacaagaaggacagcatgccgaggcgctgcgcattgcccagaggatgctggccgacggcattgcccgcgagacggtggtgaaaatcaccggcctgaccgccgacgagatcgccgcgctggcgcattgataacgccggggcggcctgacggtcgccccggttagcctcgttatggaatattccggatatacctaactttacccgcatcgccagccatctcgactacccttaatatccttaacggcatttttgactgccttagtagcgataacaaggagacatgcgatatggcctatcagacggtgaatcctgcgaacaatcagcttattaaaacgtacccggcgcacagcgatgcggacgtggaggcggcgctgcagcaggcggatgcgctctaccattctgcctgggcaaaaggcgatattgaaccgcggctggcggtactgcataagctggctgatctgattgatagccgggcggaggagctggcaaaaatcgctagccaggagatggggaaactcattaagcagagccgcggcgaagtgaaactttgcgcgcagatcgcccgctattacgccgataacgccaaatcgttcctggcgccggtgaagtatccctccgaactgggtgaagcctgggttgagcaccatcccattggcgtcttactggcggtggagccgtggaacttcccctattaccagctgatgcgcgtcctggcgccaaacctggcggccggtaacccggttatcgccaaacacgccagcattgtgccgcactgcgcggagacctttgcccatctggtgcgtgaggccggcgcaccggagggggcgtggaccaacctgtttatctcccaggatcaggtggcgaagattatcgccgacgatcgcgtgcagggcgcggcgctcaccgggtcggagaaagccggcagcgtggtggcggcgcaggcggcgaagcatattaagaaatcaacgctggaactgggcggcaatgatgtgtttgtcgtgctggacgatgccgacctggagcgcgcggtgaaaatcggcgtccaggcgcggctgaacaacgccggccaggtgtgtaccgctgccaagcgctttatcctgcacgaaaatatcgcggatgcgttcctgacaaaatttagcgaggcgtttcgccaggtgaaaatcggcgatccgctggatgaaagcaccacgctggggccgctctcttccaaagatgcgctggataccctaagcaaacaggtggacgaggcggtgaaaaatggcgctaagctgcatctgggcggcaaagcggtggctcgagaaggcaatttctttgaacccaccattttgaccggtatcacccgtgataatccggcgtacttcgaagagttctttggcccggtggcgcagatctacgtggtgaaaaacgatgaggaggcaatccagctggccaatgattcccactatggtctgggcggcgcggtgttcagtcaggatatcgaacgcgccaaacggatggcctccgccattgaaaccggaatggtttatatcaactggctcaccgataccgcgccggagctgccgtttggcggcgtgaagcgttccggttacggacgggagctctccgatctcggcatcaaagagtttgtgaaccagaagctggtggtggtgcgccgctaagcctatgacccggccataaaaaaacctgccattcggcaggtttttttatggctaatgctcagcgcaccttaactttatcgcggggcgttgaccataatcagaaggtgaccccgccgcccacataggcgccatcaatcagggtgtggttcgggcgaccctctttaccgtcaacgctcacatggcggtaacccactttcaacgtcactggaccaatcggagaccagctcacgccgccgttcgcttcaacatagtttttcacgctgttgttcagaccatccggcgcgacatacccttcgccaaacacgtggatgctgtcggtcagggccacgttcactccgccgccgaccggaaacgcgacgccgttatcgccttttttcggcccgaggtagatggctttcgcgccggcgttgagcatcaccgggcccacttccaggttgtaacccgcgcccacgccgccggtctggctaccatcatcggtattcttcagccagtggctttcggcgtacaggccagaagaggatttacccatttccatattcagattagtgaagtttttaccctgttcaacggtaaaccccaccgccatggcggaaccagagaccgcggtcagggctgcaagaataaggatgttaagctttctcatggtttactcctcgtcaataaagttgtctgagggcaccttaacaagcgatgtttacctctgcaaatgtgacttgcgtcgattttttatgctggttttgtcagggaggtgttttgaaaatgttgtaatgacgttgggttacggcgaggtcaatcagcaaatttagcctgtttagccgtggtttaattggtgggctaaacagaaactgaacagagcagtcattaattattaaggggcctattcattcagtttcttataatttccaaaaatgtttctactgttacttattaaaacgttgctttacatttttcgacgcgctgccgacgtttggtccctgtttttgacgaggtctcagagagaagggggcctgcgccttagggcgcaggcgggcaggttagcgtcgtaacccggcaaacgccgcgcgaatttcctcttccggcaactgaatgccgataaacaccagcgtgctgtgcggcgtttcatcgccccacgggcgatcccagtcggcgctgtagaggcgctgcacgccctggaacagcaggcgatttggctcgccgtcgatccacagcatgcctttataacgcatcaattgctcggcgaaggagagcagcagattttccattacccgtgaaacttcactgatatccaccggatagtcgagctcgaccacaatcgacgagacgtcattctgtttttctgccacaaaatgaaagcgcggtgtggcgctgacaaccttctcttccagcataaaaccgctggtgttaaacaactggcttaaatcgatatcgccgtgaatgacggtataaatcggcgcccgcgcgttaatgcgcgccagccgttcacgcagcttttcggtgtcgccggcgacgtcggttttggttaacaggatccggtccgcgtagccgacctgcgactgggcgatggtgaactgatccatctgctggtcggcatggacggcgtcaaccagggcgatcacgccgtccagcagatagcgctcgcagagcacctgatgggagaaaaaggtctggataatcggccccgggtcggccatgccggtgcattcaatcaccagccggtcaaactcgatttcgccgcgatcgcgactgtcgaggagatcgagcagggcgtcttccagttcgttggagcgtgtacagcagatacagccgttggtcagggttttaatctgcgtggcgcggtcgccgatgagctgatcgtcaacggagacttcgccgaattcgttttcaattacggcgattttgaaaccgtgctgctcattgaggatatggcgcaggagggtggtttttcctgcgccgagaaaaccggtgagtagggtgactgcaatcggtgccattattgcctccattaacagcagcgtacgccgcctttgccgtcgccgccgtagcgtgcctgctggcgttcgcggaagaattcttcataagtcatgtacggctgatccggatggttggtttgcatatgcgtgacgtagttgtcgtaatccggaatgccaatcagcatttttgccgcctgaccgagatatttttttgcctgacctaagttaccaaacattataagttccagataacgaataaagccggatggcggctagcgccatatccggcctacgttaatgcgcttttggtaggccggatacgcgtagcgctatccggcatcagggttaatgatgtgacgaggtcttcacgccgccttccggtaccggcacatacggagtctctttgtcggtacgcaccttattgttgcggacattgagccaggttttgatgccgtagaagatgatgctatacaccaccaccaggaacagaatactcaggccggcgttggtgtagttgttgaccacgatatggttcatgttggcgatctgctgcgcggtcagctcgccgccggcggcaatcttctctttatactgctgagccataaagaagaagccttccatctgcgggttgctgctgaacagcttcaggcccagcgcccaggtggtgcacagcagcagccatgccgccgggataacggtgacccagatatatttggtgcgctgcatcttgaccagcaccacggtgccaagcaccagcgccacggcggccagcatctggttagagatcccgaacagcggccacaggctcttcacgccgcccagcgggtcgaccacgccctgatacagcaggtagccccacagcccgacgcagccggcggtaccgataatcccggcgaccagcgagtcggtttttttcaggaacggcacgaagttacccaacagatcctgcagcataaagcggcctgcgcgggtacccgcatccagcgcggtgaggataaacagcgcttcaaacaggataccgaagtggtaccagaagcccatatccgccatcgggatgattttatggaatacgtgggcgataccgacggccagcgtcggcgcgccgccagcgcggttcagtaccgaaggttcgccgatatctttcgccgtctgcaggatctgctcaggtgaaatcacaaagccccaggagctgacggtcgccgccgcgtggacggtcacttctttcaactgcgctgcaatcatcgccgcgttctcaccgcccatttcatgcaggttcggcatgacgatgcccaggcctgccggcggggtgttcatcgcgaagtagagacccggttcgataatcgaggccgcaaccagcgccatgactgcaacaaaggattccatcagcatcgcgccgtagccaataaagcgggcatcggtttcgttggccagcagcttcggcgtagtaccggaggcgatcagcgcgtggaagccggagaccgcgccgcaggcgatggtgataaacaggaacgggaacagggcgcctttccacagcggaccggtaccatcaatgtactgggtcactgccggcattttcaggtccgggttgaggataacaatccccagcgccaggccgacgatcacgccgattttcaggaaggtggccagataatcgcgcggtgccagaatcagccataccggcagcagggcggaaataaacgcgtagccaatcagggtaaaggtgatagtggtatctttaaaggtcaacgccgggccccagtacgggtcgtgggcaatcacgccgccgaaccagatagaggccaccagcagcacgataccgataaccgacacttcaccgacgcggcctgggcgcaggaagcgcatgtagatccccataaacagggcgataggcaccgtcgagcagacggtaaacacgccccacgggctttccgccagcgctttcaccacgatgagcgccagcaccgcgaggatgatgatcataatcaggaagcagccgaacagggcgatagagcccggaaccggccccatctcctgtttaatcatctcgcccagcgaggcgccgttacgccgcgaggagataaacagcaccatgaagtcctgtaccgcgcccgccagcaccacgccggccagcagccacagggtacccggcagataacccatttgcgcggccagtaccgggccaaccagcgggccggcgccggcgatcgcggcaaagtggtggccaaacagcacgtagcggttggttggcacatagttcaggccatcgttattaatgaccgccggcgtggagcgcgtcgggtcaagcttcatcaccttctgcgcgatgtacaggctgtaataacggtaggcgacgaggtacacagaaaccgatgcgacgacgatccacagggcactgacgtgctcaccgcggcgcagggcgacgactgagaggcaaaatgccccgatgattccgagaatcacccagggtatgtgcttgaatagttttttggtatccatagtaaaacctggcgttaattagatgaataattggccgaagccgtctggttttaagtaagggttgatggaggtattgattagctaggctgcctccgatcttgccagaacagcgcgcgcgtaaagttgggtaaatcggtgagtggttgtatagggggttaagcggttacttgcgggggtaagcggttagatatgagtacgagagcgcgtaaatgtgtgattaagctcacaatattattctgcgcatctcaaagatatgctttcaaactgaggataacgatttttatcacccgcagatcactatctttatttcaagtagaggtattttgatattatgctgactttgccatgtcgtatggatagcgtttaacaaagggaattcgagttatgaaatttgtaaagataatgatcatcgccagtgctttttacttaacatatgctcatgcaagagagatacatcaggctgttgatgagccggcagccccttataatttgcgctgggggatgagttacgatgaggccagaaacacgcctttatattctctggaggtatcagatatcaattatgccggaaaagacccgtatctgattatctcaacgctgactccccaggaagtgggggcgttgaaatatcaggagatgaagctttatttcgataagaataaagggctgaaaagtgtttttgttagcgctgatgttgattccagtcagcaggcctataaagttgatgatggccgggaagcactcgccttatataatgaggaagttaaggttcttgatcgagaatatgggccagcgacaatcaaagaagagttcattgcagaaaaagggaaattctatcaaagtctttccgcctgcattgcaaaacagcaggagtggtataataaaagattagatctgaataaaataacaaattgttcaacctggcaacgtacttataaaaaaggtcgggtaaccgttttgctatacatcgaaccgagacaagtttccaaacattatatttataaataaattaaaggacttaacggtgagaatatataagattttttttagaattattgccatggtcattatggttatgatcctttctgattgtcgtcagtcgtattatattgccagaaatacggggcgcaatataatgaccttatccgaccatcagcgcgctaaatcggcgttaaacgctaacgatttaaatgcagctcagggctacctgacgggagaaaaatacaataatcgctacaggcctgttagcggtgaggaatcctggggaagtttacaatatcgggcggcgaaaatcgtcgccaacgccgcggcgaacggtcaaaaagtgcgtgatgatgcgctctatctcgcttatatctctttgtttgaagcagaagagggagtgcccgaacatcccgatattatgttgggttacatgcataaagccatggcgctactgttagcgaatccgcaattactcgataaaatcgattctaaaaatgtcagtactttacccagccagtttacccttgaacgctatgctgtatggcaatatttatacgatggcggcgagattgactggaccaaaaaagcgcctgaaggtgaaggttatacaattgctggtgaaagctatcagacctggaatatcaagttaaaaaaagctatctggaatcggggagacgcttttttaacaaatataggtaaacaacaatttattcatgacgctatagattattcgcaattcccggttattgcctgtaccgccaggcgaaaaggctggcacttaacattacctgctgactaccgggaacaaaatttccgcggcggtggacgttttgattgggcttcatgtcgcgctgttgaataaggttggcgggtgagatgacgcatattaagcgccaggtttacgtatcgggcgataagtaaacctgggcgcggattttagactgccacttccatttccatcatcaccgggtggaaacggcgtttaaagtaaatcaggccgtgcccttgcgggctcagggtaatattgcggatctccaccagatacaccaggtgggtaccgatggtttgcacctggctaatttcgccttcgaggctggccagcgagcccttcagcaccggctgcccgagcgcgccctgctgccagccgctgagggcaaaccgctcttccatcgtcaccccggtcatcccggcgaaatgacgggccatgatttcctgctcgtggttcagcacgttgatgcacaacttgccgttgccctgaaagaccgggttcatcgcgctgttggcgttgatacaaaccatcaccgatggcggcgtatccgtcaccgagcaaaccgccgtggcggtaatgccgcagcggccggcttcacctgcggtggtgacaacgttaaccgcagccgacaggctggccatggcatcgcgaaaacgcaggcgttgttcatctaattgcattatgacctcccgctgtgaattacttcagcagcttatccaacatgttgatatcagcattattgtgcagatgcggcaccgtccagccgttctggtcgtactcggacaggcagcggtcgaccatcgccatcatcttgtccatattgccggagctctgcgcctggcgcagacactgcaggcgaatttcatcctggctaccggagtagttgatctcatacagttcatggcggccgccgaattcgctgccgatggcgtcccacatcagtttgaggattttgatacgttcaacgtggtccataccgttggagccgcgcacgtacttcgccagatactggtcgatctgcgggttgttcagatcgcgggcgctggatggcagataaatcaggccgctggtgacgttgcgctcgatgatgttcttgatcttggcgtaggccatcggggccatcacgcgataggtctgcagcgcggcgtgatccggcagccatgcgccgttgacccacggcgtcgcttccgagcacatagaatcgcttaacgcccagaacatattgcgccacgccaccacttcgccaaggtcggcctgcacgccgcggaattcgagggtgccggtacattccagagagcgtttcagcagggcggtgataaagtccagttttaccgccaggcgcacgcaggcctgcagcgggtacatgcgggcgaaaccaccttccatggtccagcggcggcagcggtcaaagtcgcgataaatcagtacgttctcccatgggatcagcaccttatccattaccagaatcgcgtcgttctcgtcgaaacggctggaaagcggatagtcgtacggcgatccggtcgcgccggcgaccatctcataggaggcgcgggagataagcttgacgccttcggcatccatcggcgcgacgaacatcagcgcgaagtccgggttctcgcccatcacctgtgcggagccgaagccgatcatgttgtagtgggtcagcgccgagttggtggcgaccactttcgcgccgctgacgatgatcccggcatcagtctctttttccagcttgatgtagacatccttcacttcatcagctggcttgtggcggtcaatcggcgggttgacgatagcgtggttaaagtacaggccggtttcctgaatgcgggtgtaccagttgcgggcgttctgctcgaactggccgtaaaacgccgggttggcgcccagcgcgcagccgaaggcggctttgtagtctggggtgcggcccatccagccgtagcttaagcgcgaccattcggcgatggcgtcgcgctgctggcgcagatcgtcggcgcttttcgccacgcggaagaatttatgggtgtagccgccgctgccggtatcggtgccccagcacagggaatcctgcatctccggtttgtgcagcgcatcgtacagctgagcgacggaggccgcggcattacggaaggccggatgcgtggtgacgtctttcacgcgctcgccgtagatataaatttcgcggccatcctgcaggctttttaaatactcttcgccagttaacgggcgtttcgcgtcggcgcggaaatcttcaggtttcataggggcctcttcagtatttatcggaataataatgttaaatatatgttttgtttttgttgtttaattgaagcggttatggcgcttgtcgtgaagggacgtttgcgacaacggcgggtacttttcaggcgggagtgaattttgtgatctctgcaacttttaccggctggcgcggcgctgacccgccctacggtctgtagcccaggcaagcgcagcgccgccggggtattacgacaccggtactttttgcgcccggtagctgctgggcgagcagccgacctggcggctaaaaaagcgcgcaaaataggcggggtctttaaaccccagctgccaggcaatctcattgaccgcgctatcggaaaacagcagcaggcgcttcgcctcgcgtagctgacggtcgaatatcaatcgcttcggcgggcggttggcgaagcggcgacagatgtcggtcaaccgcgattcggtcagatgcagctccctggcgtaatccggtaccgtccagtgctgatggtagtggctgtcgatcatctggttaaagcgctggaatagcttcagctcgccgcgcatcccactggcggcgtgatcgtcgagctttgcgttacgcagcagcagggtaaagaccgcctgcgccagtagcgccagggtatgctcccgccccggcaactgggcggtagattcccggcgaatcagctgccagtagtgggccagcgccgccagctcgtcgggtttatccgccagcgacaggcagatccccggcaggccgaaggtctcccgcgtgccgggataaagtacctccagcagcggccagatcagctcctcatggaccgtcaacacatggccatcgctatcggactcggtaataaaagcgtgcggtaccgagggcggcgttatcacaaacagcggcgcctgcaccgaatagcgatggtcatcaagctgcagctcaatctgtccggtatcaaggtagtgcatctggaaatagcggtcgtggcgatgcgcctgcatgtcgcggccaaaaaaggccgccatgcgggagaacgactggtagtgcacctcttcggtacccagactctcgtcgtaatctttattgatgtcgatgttggcgatggaatgctggcacatacccgctccttagtggcctttttgcgccgctaatcccggcgcggcggcggcgtcctcacgctggctcattggaatgcgggtaagcaccagcgcaccgacgatcagtaaaccggcgacaaaccacagcccggagctaaagctgccggtggtatcgcgcaaaatgccgatcaacagcgggctgacggcagagccgacgttgccgatagcgttgatcaccgccagcgccaccgcgcgcgactgcaggctgatcacccgatccggggtggtccagaaaatggccatcgcggtaaaggatcccaccgaagccataataatgccgatcagttggatcaggctgtggtgcgttgccgaagccagcagccaacccgccgcggcgaacaggtagggcaggatggtatgcatcttgcgctctttgcggcggtcggatcggcggctccaccagatcatgccgaaaatagtgcagaactgcgggatcgccgccagcaggccaatcatgatgttgctactgccggtgttgaagctctgcaggatctgcggcgtccagatattaatggcgctgagggtattggtcaggcagaagtaggcgagggtatacatcagcaccgctggcgtcagtacttcgcgcagcgtggaacgcggcgaagccgggacgatcgccgcatgttcccgttcgcgatcgatcatcgccatcagcgcctgtttctcttcgttatccagccagttggctttatccggcgtgtcgttgaggaagaaccaggtgacgacgccgagcaccaccgacggcaggccttccagcagaaatagccattgccagcctttcaggttccacaggccgtcgagcgccagaatatagccggaaagtatcgagccgagcatcatggtcaccggcatggcgatcataaacagggcgttggcgcgggcgcgatggtaggccgggaaccaccaggtcagatagacgaggatccccggcagaaaaccagcctcggcgatgccgaccagcatgcgcaggatgtacagcgtatgcgggctggtggcgaacatggtgcaggtcgaggcgatcccccagaccaccatgatcccggcgatccagcggcgcgcgccaactttcgccagcatgatattgctggggatcccgcacagcacgtaggtgacgtagaacagcgtcgccgccaggccgaacatggtggaggtcaggccgagatctttacccatcgtcagaccggcaaagccgatattaattcgatccaaaaatgagaaaacaaagagaacaaacaggaaagtaatcaggcggcggaacagctttttgatcacccggttttctacttcaacggctttattatcattgtgttgcagggtagaggtagtcatgttgcgctccacattatccgttcaatagacggatttattgttatcggttgtggtggttgcgttgtgggtaaaccgggccgccagcgcttctgcgccgcgggccagcagggtggtatcgacgccgacggcgacgaacagcgcgcccagttcgagatagcgtttcgccagctgttcattagccatcaggatccccggcgctttaccggcctgacggatttgctggatggcatcttcaatggcggcctgcacttccgggtgctgcggattgccgccgtggcccatatcagcgctgagatccgccgggccgataaacacaccatctaccccgtcgacatcgaggatctgcggcagatttttcagcgcttcgcgagtctcaatctgtaccagcacgcacatggcgtcattggcctggtggatataatccgggacgcgattccagcgtgaggcgcgggccagcgcgctgccgacgccgcggatgccggctggcggatagcgggtggctctgaccgccagccgcgcctcttcggcattctgcaccatcggcaccagcagggtttgcgcgccgacatccagcagctgtttgatctgcaccggatcgttccacgacggacgcaccaccggctggctggggtagggcgcaatggcctgcagctgggtcagcaccgttggtacattgttgggcgcgtgttcgccgtcgatcagcagccagtcgaagcccgcgccggccagcagttcggcgctgtagctgctgcacagtccaagccacaggccgatttgcggacggcccgcttttaaggcgtctttaaaggcgttattcatggtgtttctcctagacaaaccggcagctgatggcgcccatgttgccgtagtcgacgtggaaggtatcgcccttgcgcgccgggaccgggcgggtgaaggagccgccgaggataatctgcccggcttcgagctggacatcgtacggcgccagcttgttggccagccaggccacgccgttggccggatgattgagtacgcccgcggcgacgccggtctcctcaatcacgccgttgcgatacagcagggcggagatccagcgcaggtcgagctcgtccggtttaatcggccggccgccgaggatcaccccggcgttggcggcgttgtcggagatggtgtcgaacactttgcgcggacgctgggtttccgggtcgatgttgtggcagcgcgcgtcgataagctccagcgccgggataacgtagtcggtggcgttgtagacatcaaacagcgtacagttcgggccgcgcagcggtttagccagcacgaaggccagctcgacttcgatacgcggcacgataaagcggtcggtgggaatatcgctgccgtcgtggaagaacatatcgtcgagcagcgcgccgtagtccggctcgctgatctgcgaactggcctgcatcgctttagaggtcaggccgatcttgtggcctttgagcacgcggccttcggcgatcttcatctcgacccactcgcgctggacggcgtaggcgtcctcaatggtgatcgacggataatccagcgagatcgcgcggatctgttcacgctgcttttcggcctggttcagccgctgggcaatcagggtacgggtctgtttatcgagcatagagattcctgtggcattgtattgccggatggcgcttcgcttatccggcctacaaattcatggccgttgtaggcccggtaagcgcagcgccaccgggcaatttgcacattatttaaataacgcgtgcacgttgttttgtttgtagttcagcgtcgggtcgagctcttccatggcgaacgacagcgccagatagcggctctccattagcgtcgcgaagtgggatttgatcagcgcgaacagcatatctcccacgtcctgacggctctccaggctgcgcccggcgccgatcttcagggtcatatgcacgaaggcgtaatcctgcctgccgtcggccatctgccaggtatccagccagtgggcgcggctgcggatcccgccgatcggaaagatgccggtggcggccagcgcctcgttgactttggcgaacagcccaggcagatcggcctgctcgcggatgttgtcggtacattcggcgataaaatgcggcatggggcccccttacgcctgcgctggcaacgggaacacggcgttaacctggccggtaccggagctggcgaatagctcggtgataaactccaccttgccgtcgtatttatcccaacccagcaggccgagcagcatcaccgtgtcgtgcatgttgccttcgccgtagcagtagtcggcatactccggcagcatggtgcagaactctttgaatttgccctcgcgccacagcttcaccacccgctcatccatctgatgatcaaactcgcgggtgtagctgttcatcccctcttcggcgcgctggtcatcgataaagcggtgcgacagcgaaccgctggccagcaccgccacggtgccgtcgtatttctcaatggctttgaggatcgcttcgcccagcctgcggctgtcggcaaagtcgtgaacggtacagaaagcagagatagataccaccttgaagtgcttatcgctgttcatgtagcgcatcggcaccagggtgccgtactccagcttcaggctgggaatattgtgcgctttggcacgcaccccgagcttcaccgcctcgtcggcgataagctggcccagctccgggttgccgtcgtagtcgtaggtcatgtcgcgaatgaaatgcggcagttcgttactggtgtagacgccctgaaaatggtcggcgcagttgatgtggtaggcgctgttgaccagccagtgggtatcaaacacgataatggtatcgacgcccatttcacggcagcgcttgccaatttctttatgcccgtcgatcgcgccctgacggcagccgtggtttttccccggcagctcagacagatacatcgacggcacgtgagtgatttttgctgctaacgctaacttacccatatcagactccccatttcgggatcggatggtcgcccatcgagatgcagacgtttttcatttcggcgaacacttcaaagctgtactcgccgccttcgcggccggtgccggaggccttcacgccgccgaacggctgacgcaggtcgcgcacgttctgggtgttgacgaacaccatcccggcttcaataccgcgcgccagacgcagcactttgctgacgtcctgggtccagatatacgacgccaggccgtattccacatcgttcgccaggcgcagcccttccgcttcgtctttgaacggcagcaggcaggcgaccgggccaaaaatctcttcctgggcgacgcgcatacggttgtcgacatccgccagcaccgtcgggcgcaggaagttgccggctttcagatgcgccggcaggtcggacggtttatccgcgccgccagccagcagggtggccccctcttcgatgccgaggcgaatgtagccggacactttctcccagtgctgctggctaatcagcgcgccgatctgggtgttcggatcggtcggatcgcctacgcgcaggcgattggcgcgctcggcgaagcgtttaacgaactcggggtagatactctgctgaataaagatgcgcgagccggcggtgcagcgttcgccgttgatcgagaagatggtgaacagcgcggcgtcaagcgcgcgctcgatatcggcatcttcaaaaatcagcaccggcgattttccgcccagctccatggagtactttttcagaccggcgtttttcatgatgttgcggccggtggcggtgccgccggtgaaggagacggcgcgcacatcatgatggcgcaccagcgcgtcgccggcggtggcgccgtagccctgcaccacattgagtacgccagccgggatcccggcttccagcgccagctcgcccagacgatcggcggtcagcggcgacagttcggacattttcagcaccgcggtattccccagcgccaggcacggcgccaccttccaggtggcggtcataaacggcacgttccacggcgacaccagcgcgcagacgccaaccggctgcacgagggtgtagttcagcatcttgtcgtcgaccggataggtcttgccgttcatctgctggcatacttcggcgaaaaattcgaaattgtgtgaggcgcgcgggatcaacacgtttttggtctggtggatcggcaggccggtatcggcggtttccatcgccgcgatctccgggacgttctgatcgatcagatcccccaggcggcgcatcaggcgcgcgcgctctttcatcggcaggttagcccacttcgggaaggcctctttcgccgccgccaccgcctggtttatttcggcttcaccgccggaggcgacttccgccagtacctcgccggtggccgggttggtggtatgaaaatagtctgcgccggcaacgtttttaccgttgatccaatggttaatctttttcatgacagtgtctcctcatacgcttgctggctgatgatatggttgaccaggcggcccacgccctcgacttcaacgatcacctcgtcgcccggtaccacgtcggatagccctttcggcgtgccggtggcgatcatgtcgcccggttgcagggtcataaattcgcttaaataagcgatgaggaacgggatgctgaagatcagatcggcggtggtgccctgctggcgcagctcgccgttgacccaggtgcgcagggccagattatgcggatccgggatcgcctctttgctgacgatccacgggccgatcggcgtcagggtgtcgcggcttttcacccgcaggttcgggcggtagtagttttccagatagtcgcggatcgcgtagtcattgcacacggtatagccggcgacataatccatagcctcggcttcgctgacgcggcgcgcggttttcccaatcaccaccaccagttcggcttcgtagtgcatgtattcgacgttatccgggcgtaccgactgctgctggtggccagtaaaggtgttcggcgctttgatgaataccaaaggctcggttggcggtttaaattccagctcgctggcgtggtcggcgtaattcagccccagcgcgaacagcgtgccgtcggcgggcggcagccagcggaattccccttcttttaataccgtgccatcgtccaggcgcacctggtcgcgttcatcgaccagcacgtcgcgtacctgtccctgccattcaatgcgtgcctgtttcatgccagctctccttctgcgacaaccgggttttcgagcgccgggaaaccgtcggcgagaatacgtacccggtcgccggggcgcagcgtgacgcgagagtggggcgtgccgataaggatcgcgtcgccgggattgagggtggcgaattcgctcaaggcgctcagcagctgcgcggcattacgctgcagatcgccggtatgccagctatccgcctcgcggccgttaatttcggtgatgatggtcagatcgtccacgttgcgtaccgccgatagcgtgccgatggggcagaagccatcgcggcacttggctttgatcgccgggcgataaaaactctcttccggcagactcacatcgttagccagcgcgtagccggcgatatagttcgccgcctcttccgccgccactttacgcgcggttttgccgacaatcagcgccaccgttgcgccgctttgtacggtctcgccctgcggatacgggatcgcttcgccatcgccaattacggtattgcgcggcttgataaaccagaccgcggttttcggcggcgtcttgtagggggcctgttgaaacgcctcgcgccaggcgtcgagctggctgcgatgattgagcgcaacggcgaagatggtacctttcattcaccactcctctgggacagatttcggttcaaagggatttcgttaatatattaatgatcatcttttatgctttgcgctgaggtttagcaactggaagtgaatgttttgtgatcggattaacacaatatttacataacaattacttatttgttataaatcaatagattgaatatttttcaggaaaagactggtacttttcaggtgcagaaaccggttgtacatggcaggattaacgctaattattaagttattaataagtttttggtgaggctgttgaggggatactatgcatgattcattaaccattgccttgttgcaggcgcgtgaagcggcgatggcctactttcgaccgatcgtcaaacggcacaatctcaccgaacagcagtggcggatcgtgcgaattctcgccgaacgtccgtcgatggattttcacgatctggcctttcgcgcctgtatcctgcgccctagcctgaccggtattttgacgcgcatggagcgggatgggctggtgctgcgcttaaagccagttaacgatcagcgcaagctgtacgtctcgctgacgcctgccggaactgcgctgtacgaaagcgcccaggcggaggtggaagagacctatcgcctgctggaggcccagttcaccacggaaaagctgcagcaactgacctccctgctggaggagtttattgcgcttggcgtccctgccgggcgcggtgatgaagaagagtagcggttacggctcggcgctcagcctggcgagggcaataagcgtttccgcgcgggcgggggacagcggctctctcggctgcggcagcggccagccgtacaaccagcgggcgctgggtcagtttggcctgcagccagtcgtcggcggcagccacgtcgccgcagcgcacatcctcgcagcggcacagcaggctctccggcgtcgccgcgtttttcaaagattccgccagccggaaggcgcggtttatggcgtcggcgaagcgctgccagcggcgggagcggcgcttgctcaatgatattcgtcacgtcgcctccggcctggttcatcgtatccgccaccgcctgcaggccgcccgcgctgcagcagaggatcagtttctgccagtaaaccacgccgccgccatcggcggtttcaaacagcacgctgtgcgcggaggggcgggcaatcagccgcgcgccgttcacctcccggatggcggcgatgtcgttggggatttactactggggcgcgcgcagctgcctgccgcaggctaactttagcggagacgaagaagagtaaaggagaacagtatggagtcggtaactctatcgttacctgaagcttatgacctggcgctggaggtactcagcgccaatggatttagcgccgaccacgcggcggcgattgcccgcaatgtgaccgccggggagcgcgacggctgcgcttcccacggcctgtggcggctgttgggcattgtcgataccctgcgcaaaggtaaggtatcgcccgatgccgagccgcagatccatgaccaggcgccggcgattgcgcgggcggacgccgggggcgctttttcattgctggcctacgagcgcgcgctgccgctgctgctggagaaggcgcgccacaatggcattgcggcgctggcaatcaatcgctgcgttcatttttccgcgctgtttgccgatattgagccgttgaccgaggcagggctggtagggctggcctgtacgccaaaccacgcctgggtcgccccggcgggcggcacacgtccgctgttcggcaccaaccccatcgccttcggctggccgcggcaggataagccgccgtttattgttgatatggcgaccagcgccgcggcgcgcggcgagatccagctgcatcagcgcgccggcaaagcgctaccggaaggctggggaatcgacagtcagggacagccaacgaccgatgccgcagaggtgctgaacggcgcgatgttgactttcggcggccataagggctcggcgctggcggcaatggttgagctgttggccgggccgcttatcggcgatatgaccagcgccgaatcgctggcgtgggataacggcgcgggcggtctcccctacggcggcgagctgattctggcgctggatccgcagcgctttctcggcgcgcaggcacaagagcagctggagcgcgccgaaacgctgttcaatgcgatgcaggatcagggcgcgcggctgccgggcgagcggcgtttcgcctgccgccagcagagtgaacggcagggggtcattatcagtcgttcattgcatgatgagatttgcgccttgcgccagggcgggtaaggcgcgaagcgccgccacccgggatgcctgtcaaaacagcgtgtcgagctcgtccagcacgttgtagtcgtcatcgaccagcagcaacgtcttccacttatcaaaggtcagacacgggtgcgaggtgccgaacagcagaatatcgccgacctgcacatcgctgcccggcgccaggcgcagcatacagtgctgatccatgatgccggtgctgacgatcgactccgcgcgcagcgctaactcctggccgttacgataatgggcgatcggctgcggcagcccggcgtcgaaagcgcagtcgcgcttgccgaagtttaccaccgcgcgatccgcctccggcaccgattgcaccatcgccatcagctccagcgctgatgtaagatcgccggcgagatcgcaggcaatcggatcgcgggcgatcagctcttgttgtgcgagatcgtagatcccgcgatcgtgggtgatataacagccaggacggatgacgatacggcagcggcgcggttttgccgccgccagccagatgttgcacaccacgtcataccagacggtgcccgcgccggtgagaataaattcgccgtcaaccagcggctccatgcggcaggcaagcgccgcggcctgctgtaacagcgcttccacctgcggctgcggatcgtcgccgtgcagcaccccttcatacaattccagtccgcgtagccgtagccccggcaggtcgcttacccgctgcgccagcgccagcgcgtcattgacgctacgacagccgcagcgcccgctaggcacgccaagttcaatcagcacatccagcgtttgtccctggtctgcgaagaatgcggagagggcgcgcacgttgacctcgctatcgacgcagcagataaaatccaccgcccgatagtgggcttttagctgcgcgaccacctgcatattggctttgccgaccagctgattaaccatcaggacgcgttggatgccgctggccattgccgcgctagcctgccagacgctgcccacgccgatcccccacgcccccgctcgctgctgcgcctgaaatatccatggcgtcattgtcgttttaccatgcggcgccagcgatacgccgcgggcgtcggcgtagcgctgcatccatgaaatattattttccagcgccgacttttttagcagcgcggcgggtagacagacctcttccgccagcagattagccggcgcggacatgagggcggatttgtgcgggatgagcggtgctgaatggtatttcataacactatcctttcagggtttataatcggttagtcgctgggtatcatttataactatttgataaatatatttttaatataaaaatgttattctttttgaataaaagtatcacaaagcgatctgagttttgcgtagttttccactgttttttgcgcttgtaaatggttaacttatcggcatgtcgaaagggagtaattgctatgaaagttgactggcttttcaaaaacgtcacggtgatcgacgggagcggcgggccgcaataccgtgctgatgtggcggtgaagggcgatcgaattatggctatcgccccggcgctggacgttgcggcggagcaggtgattgatggccaggggcgggtactggcgccgggctttattgatgtgcatacccatgatgatatcaacgtgatccgcatgccggagtacttgccgaagctcagccagggggtgacgacggtgatcgtcggcaactgcgggatcagtgcggcgaccgccaccatgcggggggaagtgccggacccaatgaatctcctcggcgagcagcaacactttatctatcccaccgtggaggcttatgcccatgcggtggaggcggcgcgaccgtcgctgaacgtcggcacgttaatcggtcacaccgcgctgcgcaataaccatatggacgatctgtttcgtccggcgaacgagacggaaatcgccggcatgcgcgtacagctacgcgatgcgctgcgccagggagcattagggctcagtaccgggctggcctacgccagcgccttccagtcgaccaccgaggaggtgatggcgctggcggaagagctggcggccgggaagggcgtctataccacccatttacgttcagagtttgagccgattctcgaggcgctggacgaagccttccgtattggccgtcacggcaacgtgccggtggtggtttcgcaccacaagtgcgccggggcaaaaaactgggggcgtaccaaagagacgctggcgtttttcgatgagatgcgccagcagcaggatatcgcctgcgactgttatccctattcagccagctcatcgacgctggatatgaaacaggtgaccgacgagtttgatatcgtgattacctggtccgaagcgcagccggagcaggcggggaaaacgctgcagcagatcgccgatgagtggcaggtgagcctgcacgacgccgcggcgcggctgatgccggcgggcgctatttatcacaacatggatgagcaggacgtacggcgggtgatgcgctatccggtcaccatgattggctctgacgggctgccgaacgatccgatgccgcatccgcgcctgtggggcgccttcccgcgggtgctcggccactatagccgcgacgagcagctattcccgctgactaccgcggtacacaagatgaccgggctgtcggcggcgcgcttccaactggcggatcgcgggctggtgaaaattggctactttgccgacctggtgctgtttgacccgcagacggtgcgcgatgtcgccagtttctccgacccgaaacgaccggcggacggcattgaggcggtgatggtcaacggcgtgatgagctacggcagtgataagaaaattaccggacgggcagggcgtttcctgcgtcgtcggatggactaaggagttgagtatgagtatcaagcgttatggcgtagaaggcggtaccggtaccggcgggcagcacctgccgttcgcgcgggcggtggaagcgggaggctggctgtacgtttccggccagacgccgatgaaaaatggcgaagtcttggaaggcgggattgtcgaccagtcgcgtctggcgattcagaactgcgtagatatcatgaccgaagcgggctacaccctggccgacgtggtgcatgttaaagtgatcctcaccgatgcgcgctattttcagtcgttcaataaggtatttcgcgagttctttggcgacaacccgcctgcccgcatctgctgcgtagcggacctggtggtggattgtaaagtcgaagtggatgtgacctgttttaacgctgcgcgacaataacgctcgaaacctaaaataaatccctccctttgcgggagggagcatcaaaaaagtgtgatatcggcaccagagtgaataaataaatcggtgccactgggttcgctatgccttttttcaggcatggttcctgttaactcataatattcagcggcacgaatattatttattacgtctggatgtgagccatgaataatatgtcatttatgatttggttttccgtttatgcctgcgcgatgattaccttaggctggtacgtttcgcgcaaacagaaaaccggcgaagactttttacttggcggtcgttcgctgccgatgatcctcactctcggttcgacggtcggcaccatggtggggaccggctccagcgtcggcgccgtcggctttggctacagcaacggctgggccgggatgctttacggcctcggcggcgcggtggggatcctgctggtggcatggttattcgcaccggtacgtaaacttcgcttcatgaccatgagtgaagaaatgtcgtattacaccggcggcagtaaaattattaaaaacctcgtcgcgatacttatttttattgcctctatcggctggctgggggcgcatatattaggcggcggattatatctggcgtgggccagcggcattgatattaatgtcgcgaaaattattatcgcgctggcttttgtggtttatgtcggtatcggcggctattccgcggtggtgtggatcgataccattcaatcgatcgtgctgttcgtgggctttattttaatggcgatactggcggttcatcacgttggcggctggagccatattcagcaggccgtcgatccggcggcgcaaagcctgttcgcggtcgataaattaggcgtgctgccggcgctatcattggcgatggtgattggcgtcggcgtgctggcgacgccttcttatcgccagcgtatttactcggcgaagaccgtctcctcggtgcgccagtcctttaccattaccggcctgctgtatctgggcttctccttcctgccggcgatcatcggtatggcggtatggaccatgaacccgcagctggaaaacagcggcttcgccttcttgtttgccacccaagtgctgccgccggtgctggcgatggcgatcctgattgccgggatgtcggccaatatgtcttccggtagctctgatgccatcgccgcggtgtccatcatgctgcgcgacctctacaccctggtgaccggccatatgcccgcgccggagaaagccattcgcctgtcgcggatcttcctggttctggtgattgcgctggcgctgctgtttgccctgacctccaacgacatcatcagctacatcaccaaaatgatctcgatgattatgtccgggatgtttatctgcaccatgcttggccgtttctggacacgctttaactggcagggcgcggtcgccgcgctggccggcggcgccggggcatcggttgcggtgctggtggatagcgactggctggcgttctggggcaacccgtgtattccggcggtgctgacgagcctggtggcctcggttgtggtgacgttactgaccccggccagcagcatgagccgcgagcaggcgctggagatgattacccgcgagcgtgaaagccgcccaacgccgccgccgctgccgattggcaaacgtcatacctcacgcgggtaaggggcaatcatgaacgagtatattgccgtcgattggggctccacccagctgcgggcatggcggatgcgtgatggcgaatgcatcgacaagctgaaactgccctgcggcgtcacgcgtctgaacgggcagcgcgccgaagcggtatttcagcagcagctggcgccgtggcgcggcgaccccgcgctgccggtggtgatggcgggcatgatcggcagcgatgccggttggcaaccggtgccttatctgacctgcccgctggcgctggaggcgctcaacggtcagttatatgaggtggcggaaaaagtgtggatcgtgccggggctgaaagtggcgcaggctgcagattacgacgtaatgcgcggtgaagaaacgcagctgctgggcgcctggcaacagatgcccgcggagtgttacgtgatgcccggcacccactgcaaatgggtgcaggtgcaaaacggcgtggtgcgccagttcgccacggcgatgaccggcgaattgcatcacctgctgcttaaccattcgctgctcggccagcaattgcctgcgcagttgccggatgaagccgctttcgccctcggtatggaaaaagggttaaatcagccggcgttattgtccgggctttttagcgcccgcgccgcgcgggtgttaggcgcgctggcggcgacttcggtgagcgattatctctccgggctgttgattggcgcggaggtggcgacattcagcgaacgctatcgcgccagccgcgtggtgctggttggtgagcactcgctcagtgtccgttatcagcaggcgatggcggcgcgtgggttagccgtttcccgttgctccggcgaggcggcgtttctttcgggtatagcgaggatgattgatggacaagattaagctggtggcgattttacgcggcattcaacccgctgaggcggcagatcatattgagacgctaataaatgcaggctttcgctatatcgaaatcccgctcaattcgccggactggcagcaaagtattccggcgatggtgcgtcagtttggcgagcgggcgatgattggcgcgggaacggtgctgaaggttgaacaggttgattttctcgctgaagccggggcgaaacttatcgtgacgcccaatacggccccggcggtgatccgccgcgcggtagataaggggatgctggtgtgcgccggctgcgcgacggcctccgaggcgtttagtgcgctggatgccggggcgcaatggctgaaaatctttccgtcatcagcattcggcgcggactatattcgcgcgctaaaagcggtgttgccgccggaggtgccggtgctggcggtcggcggcgtgacgccggaaaatctggcgacctggatacaggcggggtgcgccggtgccggtctgggcagcgatctttatcgcgccggacaggccgtggaacgtacccgcgaacaggcggagaggtttatctccgccagtaaaagttagtcccccagcggctgccgatcgacgccgccgcggtggctgtcgagcgccagcttaatacggcgtaatttgccttttgcctgggttttgttggccatcgccagttcggtggccagcacatcgaccatcgccagcatcgcgtaacgggaagtgctgggcttaaagatatagtcgttttcccgtaccagcagcggtagcaccagatccgcctgttcagccagcggcgttccggcgggggtaatcgcaataaccttcgcgccgtactggctggcaatcgccgcgctctcgatgatttcccgggtatagccgcccagagacagcacgatcaccacatcctgcggcgtcaccgccgagctcatcatgcgtaccagcagaccatcgctctggctgactaccggcagaccgaggcgaaacaggcgatactgaatttcctgagcgcagatggtcgaaccgccgcccatccccagggcgaggatctgccgcgcatcgctcagccagctcaccgcgcgcttcagcgcctcgatatccagcgcccgccggttggtctccagtacgctgatgattgactcatagatcccctggacgccttcgagatccggaacatcgaggataaaccgctggccgaccgcaagagattgcgcaagcttcatcttcagctcgcggacgtctttacagccgagcgcccgggcaaaacgggtgaccgaagcctggctggtttgcgtcagacgcgctatctcggcgatgggcagctccgccgccgccgcgacatcatcgagaataaactgcgcaatgcgtttttcggtcgccgtgagttccacaaagcgatcggttatgcaggaaataatatcgattgaccaggacatacggtaacaacgggtaagttttgaatggtactttgtaccatattgcgccgctgaaagcagtgctgaagtctacaacgccaggcgcatggcgcagcgcgactcgggcggcaggccgtgccgggtctcctgttccctttttgccgccagcccggcgggcagggtcagctcatcgagcatggcgaatcccagacgggtataaaacggcgcattccacggcacctcgcggaaggtggtgagggttaccgccgggtagcccatctgccgtgcgctctcgataacccgctccagcagcatccggccgatgccctgttgctgccaggcctggtggacggcgacttcgacgataaataacgcatcgtcgagcggttcggtcagaataaagccaacgggttgcccggcggctaccgccagcaggctatgctccgtttccagataatcatgatggcgcgcaacgctaatcacctcgctgtccgccagccaggcgagagaagggatctggcgaaatgcctgggcggcagaacgttcaatggcgggcagaagggcgatatcgctctcctgagtcaggcgtaatacggcaccggcagttatagtgttagttttcatcacctcagcatagcagccttcgggagaaaagtatggagctgaccgccgttcccgccacgcagttcagcagcgtgcagttaacggatattctcaacgcctgttttgaagcctacctggtgcctgttacccagtcggtagagggatttgttcagcgttttagcgccgaggggatgagcctggtcgattcccgcgtctggctggccggagatgaaccggcggcgatcgcgatcgtcgcgcgccgggggagtgccgctcgcctggcggcctttgccctgcgcccggcctggcgcggcaaaggcctgggccggaaactgatgcaggagctgctgatgcttttgcaacagcaggggatcgagacggtatacctggaggtgatccgcgataaccatgcggccgtcgcgctgtatcagtcgctgggctttacgcgacgctatgggctctgcggctacctgagtacagaacttctggccccggtgccgggcgtattgcagctttatcccaccctgtccctgcttcggcgcgccattgaggagagtaacagccagcttccctggctgctggatccgcttaccttcgccactctgccatgtcaggtcgtgacgctggaacagcgcgccttcgcggttctaacgacggcgggctcgcgccctgtactgtcgtttttgtgggtggagcccgccgcccgccgccaggggctggcgcgtgagctgctgatggcgctggcgcagcagttcccgggcattggtacttcggtgacggtcccggaaacttttacgccgctgtttgccgcggccggctatacgccgctctcgctgcagcagtatgaaatgacgatggatctggccgacgcgaagtcggcttagccaggagtgtgcgctggaccgcaaaaaaacagcacgggccgtcgataagcctctcttttcccgcatcatatcccttcgtaatggcgaagagggggatgcgatgcgtaaaacggaactgttggcttttttgcaaaatcagaccgattttttcgatccggataacctgagcgaggtctttaccgccagctggctggcccggcgtttcgcgatgcaaagaaataccgccagccattatctcaatcagctggtcgctcaggacgtgctggtgaaaatcaacacccggccggtctattttctgcataaaaaagccttttgccagcagttctacccgctttcccgcagtgagtatgccagcatggcggagttactcgcggagagcgaccgccagccggagcaggcggaccatttttcgttgctgaccgggcatgacggcagcctgcgtaaaccgattgagcagatgaaaaccgcgctgttttatcctaacggcgggctaccgctgcttattaccggcgacagcgggaccggcaaaagctatatggctgagctgatgcatgagttcgccatcgcccaggagctgctggcgcccgatgccccctttgtgagctttaactgcgcgcagtatgcgagtaatccggagctgctggccgccaacctgtttggctacgtcaaaggcgcgtttaccggtgcgcagagcgataaagcgggggcgtttgaggcggcaaacggcgggatgctgtttctcgatgaggtccatcgcctggatgctcagggacaggagaagctgttcacctggctggatcgtaaggagatctaccgggtgggggagaccgcgcaaggtttgccgatttcgctgcggttggtgtttgccaccaccgaagatattcacagcacttttctcaccaccttcctgcgccgaatcccgatcctggttagcttgcccgatcttcaacaccgtagccgcgaggagaaggaggcgctaacgctacagtttttctggcaggaggcgcgcacgcttgccgcccggctgcaactaacgccgcgactgttgcaggtcctgacgcagtatgtttatcggggcaacgtcgacgagctgaagaatgtggtgaaatacgccgtggcgtcagcctgggccaggtctccgggccgcgaaatgctgaccgtgaggctgcacgatctgccggagaatgtcatggccgcgacgccagcgctcagcgaagcgatgggccagcaggagccgctgcttatcgagccgcagaccagcctggtctggctgctgcgtgcgcgcgacccggtacaggggctgatctatgacgttcagtgtcgggttctggcgcagtatgaagcggtgctgaataaaaaaacggtctgggaagaggcgcaaaggagcatgggggaagagattgaaaccctcttcgatcggctgatctttgataatcatgactccagtagcccgcagatgctgctgctgatcgctcatcaggttcgggaggagtattatcgcctggaaaagcgcttcaatatccagtttaacggcaactgcctctacgcgctgagccactacctgatccaccgatcccgacaggcgcagtccacgataaacaatgaaaaagcccgccagctggaggacttcctggtacagaagtttccgctgctgtatcgcttttgcgaagcgatcctcggtgcgttgacgctgaagctggatattgaaccccagcgtatcgacctgctgctgttagtgctgtggttccacaagaatggcgccatcagccagcagcaggtgacccgggcgataattctcgctcacggttacgctaccgccagcagcatcgccaacgtggcaaaccgcttgctgaaaagccagctctttgagtcattcgatatgccgctggacgtgacgccggaggctatcgctaaccaggtgatggcctacatagagagccatgctctggcatcaggattgataatcctggtcgacatgggatcgctgaacgccattcaccgccattttaatcgtcgcctgagtacgccgatggcgatcatcaacaatgtctccaccggtatggcgatgtacgtcggggagcgcattttgcagggcgttatgctggaagatatcgtccgcgagatcggcgatgaccttgcggttgagcaccagctctattacccgcaaaccgataagccgcgggcgattttaaccacctgcgcgaccggtctgggcgcggcggcgaatctgtcggcgctgttaaaagccagcattcctgaagcgcttggcattgatattgtggcctgcgatgtggagacccttgccgatcccgcgcgacgggagccgatgctaagccgctatgaggtgctggcgatcgtcggcaccctggatccgcatcttgccgatctaccatggatctcgctggattcgctgatctctggcgaagggagtcgtccgctgatgcgcatttttggcgaactggcgacggcggagcaggtcagcgagatcaacaacctgatcctgaaaaacttttcgctgcgccgggtgatcgagtcggtgacgatcctcgatacggctaaggtgatcaaccaggttgagcagtttttgctgcgctatgagcatctggccgggcgcgatgtacctaacgatcgtaaggtcgcgctgtatgtgcatatcagctgtctgatagagcgattaattcgtcacgcttccccagcccaatacactggagggcagtgtccggatcgcgagctggctacgctacgcgaggcctttagtgtcatagagagcgggtatagtgtcaaaattcccgttgtagagctctgctacattcacgatatcctgacgcgggaaacggaatttattcaggaagatcaagacttttaacacatctcttcttttttatccttacgttagccgacgcgccactgtttctggcacgtcggttgcaattaagaaagcagtggaatgcgctttcgaggtaaggatgaaacgacactatatttttgccagccatggcagctttgctaacggtttgttgaactccgtggaactgatcctcggtaaacaacccgatatacataccttgtgtgcctacgtggaagaagaggtcgatctgacgcagcaggtggaagcgctagtggcgcgtttcccggcgcaggatgagctgatcgtaattacggatatttttgccggtagcgtgaataacgagtttgttcgttttttatctcgcccacatttccatttattatccggtttaaatctgccgttaattattgacttgctgatttccgcagcggaagacaataccgaaaaattaattaccgaggcattaacaaacgccaaagagagcattcagtactgcaatcaaacgattgccagcgcgatgactatggataaagacttctgaaatgaggaagcatgatgattacgttattaagggtagaccatcgattacttcacggccaggtggccttttcctggacccaatatgtcggcgccgattgtattttaatcgccaacgatagcgtccctggcgatgagctgcggaaaaccaccattaagcttgccaaaccgccctcggtgaagctggtgattaaaaatataaatgattctattgaggcaataaaaagcggggttaccgataaatataatttatttattgttgtggagtcggttaatgacgcctggcgtattgccagcgctatcgacgaaataaaaagcataaatcttggcggaataaaggctaaagagggcagtaaaaatatctctaaggcgattaatttactgccgacagaaatagaacagctacaacaactggtgggcaagggcgtcgaagtggagattcgccaggtcccgaacgatcgcaaacagctttttgcggaatgcgtgtaattccggaggacagattatggtagaggctctcttactgggtctggtggcgtttatcgcgcaatcggaatatgccttagggacgtcgctaatttcacggcctatcgtcaccgggctgctgaccgggctggtgctgggggatgtacagaccggcgtcattatgggcgcgacgctggagctggcgtttatcggctctttctccgttggcgcctcgatcccgcccgacgtcgtgaccggcggtattctcggcgtggcgttcgccattacctctggcgcaggcacagaaacggcgttgttgcttggcctgcctatcgccacgctgactttgatcctgaaaaacatctatctggggatgttcattccaatgcttagccagaaggcggacgggtatgcggaacgggcggatctccgcggcattgagcggatgcatttgattgccggattcggcctgtcgctgatgcttgccgcggtggtcaccgtctcattcctggtgggcagcaacgcggtgaaatccctgctcgatacgatcccggaatttatcaaacatgggctcagcgtcgccaccggcatcatcccggccctcggcttcgcgatgctcgccaggctgctgattaacaagaaagtggcgccgtattttttcctcggttttgtgctgatggcctatttgaaaatcccggtgaccggtatcgccattctcggcgccatcgtggcggtggtcatggttaacgtcaccgcgttgaattcacctcgtacgacgacagaacaaggagtcagcgatgacgacgaagatgatttctgaagagaccctgcagccgcaggcgcaggaagaaacccggattacgccgcgcgatttacgccgggtgttctggcgctctttccagatggagttctcgtggaactatgagcggcagatgaatctcgcctttgtttacgcgttgatcccggtgctgaagaagctctatccgcgcagagaggatctggccgcagcgctgaagcggcatctggtttttttcaataccacgccgcatatcgtcaccctgctgctggggatcaccacggcgatggaagagaaaaacagtcagcagaaaaacatggatgccactgcgattgataacgtcaaagcctcactgatgggaccgttagccgggctgggtgactctttcttttgggggacgctgcgcctcatcgccaccgggatcggcaccagcctggcgctgaagggcaacatcctcgggccgatcctgtttctgctggtatttaacgtgccgcacattctggtgcgctggtgttttacccgctggggctacgtactgggcaccggggtcctgcagcggatccagaagagcggaatgatggagagcctgacctacggggcgtcgattatcggtctgatggtagtcggggcgatgaccgcttcaatgatcgatatcaccattcctctctccttcggcgccggggaggccaaaacccaggtacaggacattatcaacgacattctgccctgcatgctgccgttggtgagttttggcatcgtctactggctactgggacggaaagttaaaccgctctcaattattggcggcatggcgctggtgggcattctgggttcgtggatcggattgttttaacgggagtgagctatgcgaccaacaatgatgacatatatcagtgaagagccggcctgcctggcgcagatcctgcgcgactaccggcaaaagctggcgccgattgaaaccttcgtccgccagcacccggtacggcgaatattattgctcgcgaccggatcgtcgctgaatgccgcgctgtgcgcgcgctatttctttgagcaacgcttcggtgtgctgcttgacattaaagagccgtacaacttcacccattacgacgcgatcgacccgcatgccgatctggtggtggcgatttcacagagcggaaaaagcgcgtcgacgctggaggcgatgcgtaaggtacaggcttccggcaagtcggttttcgccctgacctcagatccgcaaagcccgataggaggcgccagcgatggcgttctggatattaataccgggatcgagagcgtagggtttgtgacccgcggctttagcgcgacggtgctcaacctgttgctgatagcgctgatcattgctcgtaagcaggagaaagccagcgaggtcgaggagcagcactatctcgctgaattgcagcggctggtagcggcgatcccggaggttatcgtccgcacctcgcgctttattgaccgccatagcgaaacgctgcgcagcggcgagcgctttgtcgccaccggctacggcgcgctggttggcgtggcgaaggagttcgaaaccaaatttaccgagacggtgcgcgtgccttccagcggctttgagctggaagcctatatgcatggcccctatctggaagccaatgcccgccatgtgatgctgtttattgaagatacgccggacgcgcgaacccgggcgctgcgcgactatctggcgccgtccattggccgggcctttaccctgacgctgggtgacgaagaggatgctcaaacgctggcgctaaactgtccgtgcgagcatcacctggcgcctctgctgctgattgtcccagtgcagatgctcgcctggcataccgcaggactgaaaggcatcgatctggctaaacgtattttcgacgattttgaccgcgtcttaaaaagtaaaatctgaatattcaggagaaaactatgttgggttttaatcaggacgagtacctgaccagtgctcgcgagatcatcgctgcgcgtaaacaggctgaaaccgtagccgacgatatttatgacagcggctgtagcgcattattttttgcttcggtaggtggttccctggcgccgatgatggcaattaatgaatttgccaaggaattaaccagcgtgccggtatatcttgaacaggccgcggagttaatccatcgcggacataaaaaattaaataaagatgcggttgtcgttacgttatctaaatccggcgataccaaagagtcggtcgccattgccgaatggtgcaaggcacaggggatccgcgtggtagctattactcgtcacgccgactcgccattggctgccgccgccagctggcatattccgatgtgccacaaaaatggcgtggaatatgaatatatgctgctgtactggttattcttccgcgtcatttttcgtcacggcgagtttgctgattatgcgcgatttgccagccagctcgagttactgccggaaaatctcctgcaggcgaaacgccagttcgatccccgagcggatagcattgccgcgcaataccatgactgcgactatatgatgtggattggcggcgcggaaatgtggggcgaggtctatctgttctcaatgtgtattctcgaagagatgcagtggaagcggacgaagtcggtgagctccgctgaatttttccacggcaccctggagctgctggaaaaagaggttccgctgtttctggtgaaaggcgaggggagatgccgggcgctggacgaacgcgtcgagcgttttgccgaaaaaataactgaccatctggtggttatcgacccgcgcgactatccgctgaacggcattgatgacgcgttccgctgggttatggcgccgtgcgtggtgtccaccctgctggtggaccggctggcggcccactttgaacaccataccggccacgacctcaatatccgccgttactaccggcagtttgattactaagccgtgttgatggcggccagccgggctggccgccatgctattctccgaggcgcttcccagaaaattgtcgtcaaacccaaccgggtaaaaaccggtgatagagtccggcttaccttctctttcaggcaagcggatggccatgaaaaaacggatgacctcgacgccgcacgatgcggtctttaagcgatttcttcgtcacccggagacagcgattgatttcctcaccctctaccttcccgaagcgatccttcagcggtgcgatttctctaccctgaggctgcaatcggcgagctttatcgatgaggatctgcgcgcctggtattcagatgtcctctggtcggtgcagaccacctgcggcacggggtatgtttacgtggtgatagagcaccagagctcaccggatagccatatggcctttcgcctgatgcgctatgcgattgccgcaatgcagcgccacctggatgccgggcacaaaacgctgccgctggtggtgccgatgcttttttatcacggtgcaaccagtccgtatcctttttccctcaactggctggatgaatttgccgacccgcagctggcgaagacgctgtatggctgtccgtttccattgatcgacgtgacggtgatgccggacgatgacatcgtgcaacatcggcgagtcgccttgctggagctgatgcaaaaacatattcgccagcgcgatctcagcggcataacggagtcgttggcggccgttgtgatgctgggatacactaaccgtcggcagttgagaatgctgtttcactatatgctgcagtacggtaatacggccgagccgggcgtgtttctccgccggctggcccgccgtctgccacagtatgaggagacattgatgtctatcgcgcaaaagcttaagcaggaaggtcgggaagaaggccgggaagaagggcacctggagggcttgcaggaaggcagccgacgcgaggcgctgcgcattgccggcagtatgttacagaatggcctcgacaaagagatggtacaggagatcaccggactgtcggctgatgaactacagccgctgtgtggttaacgtcctgccacgacaaccgctgcccggcgcgaaaattcgccgggcaggattgcgttagccttcgcttttcaccactttgatctccaccatgccgatccccaactgacgcggggagtggccgaggatattaccctcgttagtggtttgcgggtccggcggggtgatgatcagcgtgttgctgcgcgttgggttgtcaaaatgcagcgtcgtggtagtcacgtcattatccagagtgagcacttgctcactttctccaactcgcaccggaattggcttattggcgtttgggccataagctttggcggtgatcaccagatcaaatttctccggcagcggctctttatattcaatcttcacgtcgctgcccaactgagcattggaccaccgcccccacgactcgggacgcgaaataccgctgaactgtttaacctcttccggggcgccagcgacgttaaacacgaagctgtcggccttatagcgaatatcgttgtcgacaattttcagcgtatcgacgttgcccttatagcgctccatatcgataagggtgtccctgaaggcggtcttgccgtgccactgcggcttatcaacgtgctggaccttctgctcaccccccagctgtccctgcgagacgcaccagtcggtggagagcgccagctcaggcgaccacagctggcccattttatagcagcgatcgacccacacgaaattatcccgtggcgcgaaatcggccagctggaagcgcagcggcgcagagtattcactctccggcagcggttctacgcgctggtcagatacccgcagcagcagcggcagacggaaatggctgccggagaaagcgatcatatttttctgcgagtcgatggtgaaattcttcatttctttggggaaattccacaggcggatcacgtcaggcttccatgccaggactttctctttcatattcatgaaaataccggagagcgactggccggagaggctgctacgcccgaggccgatatagttatcgccgccgagaatatccagcaccgtcgcgccgttatccatggtgttgcgtttcaccgccagggtctcctgctgcggtttatcgccgcgcaggacgaagaacagattgctgcgatcgtgcttgttgagataatcccaggcgctgttcttcatggccaggtgatcggaagagaccacgatgaccgtgtttttgaaatagggtgaggctttaatcttctctatcagcgcggcgatatgttcctgactgcagctaacggcgctgaaagagaggtttttcttgccgtccacatcatagcgtttacgctcgcaggtgcgtgagataaaaccgtcgggatggtgggtatccaccgtcagggcgaagagcgagaagcgtttcccggactgcgacagctcttcgaattttttccaggtctcgtcgagcacagtgtcgtcatagaagccccagtcgttgcggtaggtaggatccgccaccgtagtttttagctcttccgccccgtacagatgatcgaagccgtgggatttaagaaacacgtctttgccggcaaagcgcaggttagccccctgcacaaagtaattctcgtaaccggagttcttcagaatatcgccaaggcaaatattctgtggaaagaagctggagactgaggctgaggcattaccttcgaacggcgcgaacagcggaatgccgcactgtgaggcgaccatgccggcgatagtgtaatcggtccccggcagctgcatggtattgctgaaatcaatggcctcagctttaattctgccaagctcaggggtgaggttggggaaggcgtcgttatcaaaataggtgcgctcgagactttcgccatagatatagaccaggttcagctgcggattgtcgatttgcttcgacggctctttatagtacgcggcaaagtctggatcgccctcgcgtgactgggatttcaccagctcgctgatctgatggaaggccgggctggcatcaacggaggccagcgccagcagtagcgccgccaggctgtaaccgacgtgatgaggatgatgccgacggcggcgcagcacccagccgagggcgccaaagacggcgaccagtgcgacggccacgccgacccccggcagtatatatttgccgatcccggcgccggtcaggctgttggtcagagtgtagagtaccgcgtcgttgatgccgtcgccggtgaagtagtcactggcgtagagggtgatattcagcaccacgaacaggcctaacaccgtgagcgtggcggcaaaccaccaggtgttacgacccgctttccaggcatacagcaccaccgaagctaaaaataaggcgatggataacaactctgacacagctcatcctcattaatgccagttatcggctggcagaacagattacttttcaagccccactgtaattgcagcgccatcttgctgcaattctagcgtcatgaaagtgtgcagttattcagaattggtttagaagttgccttttttgatcggcatcgcatcgggcgaaatgggaaaacgaaacaggaaaactgcaaaaaaaagcgtttcaggccgcggcgccgccgcgaaggcaacaaatgcggccttgtcagtcaggatcaggagaggaaattaacaccctgttttaagaccagatcgcaggctttggtttttacctgtttcgccagcgagctattgccgagcgtattcaggtccaactgctggccgtttttgctgttgagcagcccctgcaggccatccagatagctggtgtcctgtttttgtttttccggcgtgctaagccccagtttatccagcacctgatttttgacgttatcggcgctggtcacggaggccagcttctgtttcgcgcaatatgacaggatcccggccgcattattcatgctgctggcggtcagggattggctgctgccgttaagcaggctggttagcgaggagacggacatgccgccgctggcctgggcgttactgccgctgagctggctggcagcgctgttaagggaatcctgccaggaggcggcgtgggcgccagagagggtaaacgcgctaacggcaagcgcggcaacaacgctatttttaaacgatttcatagacggactcataagcgtgactgaataatcgctttagtataacgccgtcgtcgcccggaaatctcttaatactccttgcctgtaacgcggtgccggtaactttcccaattgaagataacccacaggctgttgccgagccgcatacggtccatcacccgctcgccgagcagtttgttcatctcttccatattgctgttggtgagcatcccggtaggtcgtttggaggatgagcgccggtcaactatctgattgataatgaccttttcatagcgagactccgtctgcataccaatttcatcgatcaccagcaggtcgactatgctgaggtcgttaagcaactgttcttcgctcgtttcccggttgccgaaggtatctttcatcgccgacataatatcggccacggtgatgattaagaccgacttcccgcgcagcagcagctcgttgcaaatggctgccgccaggtggtttttgccagtgcccggtttaccggagaagataaagctggcgatattgccatcgaactcttccacgtactggcgcgcccgggcgagcgcattcatctgcccctcgcactcgacgcgatagttatcaaaggagcagttctgatgcagcgggcggatccccgagcggttgaaggtgcgctgcattttcatcgcgcgattctctcgctccagcgcttcggaacgcagccggccttgctctttttgccaggccagcagctcttcgccggttttaaacgccggttcaatatgtgccggcatcattttctgcaggcgtttcatcaggtcgccaacgtttttcatgctcatcctcggaaacctcgcggaatatggctgtcgggttcgctaacgctgttcacatcgcgcttcggctgtccgccgttgctggcgcggctgatttgcacgctacgcgccagcttctgctgccactgcacgtggtgaaagactttaccttccgcctgccagtaagcgacgaaagcggccagctcttcgggggtaaccggctggctcagggcaatgccccacagcgcggccaggcgctgaaaatcggcgtcaggctgccatccggcgtacatagcaaatttgcccatcggcaccgcaaccggcgccgcggcgggctcctcgaaaaactgcgggtcaagcgcgatgtcgctgccggggcgcgccagcctggcttccagctccagcagttgcgccagccgcgctggcgtcagcgcatagaatgccggcgcgttattggcaaaaacggcaacggtgccgtcagtcgattttgccagcagcgccgcgtgctgctggaggaactcttccaggccgctaaaatgggaggttaaaattcgcgaagacataactctatctcaactctgaactgcaaagagtggggtgatctgcacatagtagcacagaggccatcgcggaaggagcgtcgcgggttaaccgcgacgtcggggttagacgcgaggacgcttacgatacagccacaggccgggtatcgacaggccaatcgaaagggcgcccacaatcgaagaggcctttaaaaaattgctcagcagcaaaatcatcatctcttccgaatagccaaaatgactgatttttaccgcggaaatcatcgccgtgtaggctgagatgccaggaaacatcgggatcacggcggcgacggtaaaaatcttcggatgcgccagataccagcgcgaccattgaatgccaatgctgcccaccagcagagcggcgagaaaggtggcccattcaatgttaaaaccggcgctcatcatgatcatacgcgagccatggccaatcgcccccagcagcgcgcaccagcgcagagcgcgctgagggacattaaagaccatcgcaaacccgacggcggggatcgccgccagcagcatgtcttccgccagcgcaaaaataaatgagattatgcccatccgcgcagcccccatacggtcatggccatcaccacgccaatgcaggtggctagggttagcaggctggcgatcgcccagcgggcgagtccggtattgatatgccctttaaacatatcggcgacggcattgattaatggaaaacccgggaccagcagcaggacgctggcggccatggcaatggtcggcgtgctggcaaacgccgggaggcgcagcagcagcccggagatggtggtggcgacaaaggcggtgatgcagaagttgatctgcggatgcatggagcgatgggtcagcacctggcgaatgtacatggctaccgtgctggcgcagaagctgaccagcgccccatcccaaccgccgttattcagtttgcagaaacaggcgcaggaaagacccaccatcagcaccagcagccagcgcggatagcgcaggggaacgatctgcgcaaaacgcttctcgacgtcgcgatagtccagcagcttatgctcggcgaggatcacaatgtgctgcacttccgtcaccacatgcatattaatgccgcgatcgacatttttgcgcgtagaggtaagacattcgccatttttaatggtggtcaggacgatggcattcgaagagatggcgctttcaacgctgtccatccccaacgccagcccgagacgtgttgacagttcctccaccagcgcactctcggcgccgtgctgtaacagaaaaagaccacactggatgcataaacgtgtgattgcccgctgctgtgtccgatcaacctgcatacttcctctattgtccacgacgcctggtatctgccgatactttaacctgaagcgcagtggcggctgaggggggtgggatcaaataatgtgcaaaaattcccagtctgcggggcggcagaatttgaagcatcccacacttttgccagtttggtgaaaagtgcaatttttgtcgccattcatcccttctttttccccactgacttatcaaaaatgcagaaaagcacttttattaaacaaaaattatacaaataattaaccctgcaagagtgagacatccctatgaagacacaggtcgcgattattggcgcgggcccctccgggctgctgctggggcagttgctgcacaacgccgggatccataccgtgatccttgagcgtcaaacgccgcagtatgtgctggggcgcatccgcgcgggaattctggaaagcggtaccgttgatctgctgcgcgaagcgggcgtggcgcagcggatggatgccgaaggcctggtgcatcatggggtggagtttctgtttgacggccagcgggtgcccgtcgcactgagcgagctaaccgacggtaagagcgtaatggtttatggccagaccgaagtcacccgcgatctgatggctgcccgggccgccagcggcgcgccgatcgtctatggcgtgagcgaggtggctatccatgacgccaaaagcgaccggccgacgatcacctacctcagcgaaggggaaacctgccgtctggagtgcgattttattgccggttgcgacggtttccacggcgtatcgcggcaaagtattccagctggcattttgcagacctacgagagcgtgtggccgtttggctggctaggcctgctggcggatacgccgccggtcaatccggagcttatttatgcgcaccatcagcgggggtttgtattgtgcagtcaacgctcactgacccgcagccgctattatctgcaggttccgctgagcgataaggttgaagcatggtcggacgagcgcttctggcaggagctgaaaagccgcttgccggaggagctggcatccaggttagtgactggtcactcacttgagaagagcattgcccccctgcgtagcttcgtcgtggagccgatgcaatatgggcggttgttcctggtgggggatgcggcgcatatcgttccgccaaccggggcgaaaggattaaatctggcggcatcggacgtgaactatctgtggcggattctgcgcgaatactaccatcgtggccgcagcgatctgctggcggcctactcgcaactggcgctggatcgggtctggaaaggggaacgctttagctggtttatgacccgcctgctgcatgattttccggatcagaacgcgttcgacgctaaaatgcaggccgccgaccgccgctactatctgggctcgcgcgccgggctgaccaccatcgcggaaaactacgtgggcttgcccatggagcgtgtcgcctgaattaagaggagtcatcatgccgttcgttcaaaccgtgcccgtatttaagctgtatggcgaagagtgcggctggccgacgccggacctgctgcactgtgagtcgattttacagcgcagcagcctgtatcagtggcatattcgcgtccatcagcatgcggaaatggtccagcttctctatctgcatcaggggcgggcggagatcgaaattgaaggcgccaccgcggtgatgacggagtcctgcatccaggtggttcccgccctctgtattcacgggtttaatttttcacccgggacgcaagggtttgtgctctctctggcgctgccgctgctgagccggtttgaaaatcagttcggtcgccctctggatgtgcttagcgtgccgcagtgtgtgccggtgggccgttctcgcgggcgcatgcatacgctgttttcagcgcttcgcgaggagtactgcgaagagcacgatgcgcgagaaatgatgctctattcgctgctggggacgctgttggtctggctgaaccgacagtgccatcccgcgtcccccgcggaagataaagcggagcggaagcgcagcatgatgcgccacttcgcccgccttatcgagagccactaccgacagcatctcccgttggcggagtatgcgaagctgattggactgtcggttacgcacttaaattatttatgtcgtgagttttatggctgtagcgctcttggagtattgcatcagcggttgatgcttgaagcgcgacgcaatctgcagtacacccgcatgacgattacacaactctctgattatttggggtttagcgacgcagcctatttttcgcgttttttccgtcgctatagcggtatgtcacccaaagcatttagagaaacaattaaagataatgcttcataatgttcagtactgaaattatttttgctaaataatgtttttatcttttctaatttattagcgcaggaacgtctgtgttaatattaatcgcaagtatacacggcaataatattttacacggtatgaccacggttcggtcgttacgtatatcgtgtgcgcaggccatgaatatgattttaatattcatccaggaaatgatatggcgataaagtcgctcgccgatcgtttgcaggcaagcgaaggaacttcgacaggaagcggaggtgttatgttaccaggacaaggtaagtttggcgtcgttattagtaaaattcccgtcatgcaatcagggttaaaggtgatcttcaatgagaacctccctgattacgagctgagtttttgtcgttctcatgatgagctcacccttttacaactgcggcgggcggtgctggttgtcgcggatatctccggcgagattgcgcacccccgagccgtctgcgagcgttattactccctcatgacccagtaccgtgatattcactgggtttttatggtcagcgacagcctctatccgttggccgttgagctattaattcgtcctgaaagctcgttgatctccgagagcgagccggttaaccggctgattgaggtgatttgcgccggtagccgtgcggctgaacagattagccgtacgctgtttgccgggtatgaggacagcgatttcgcaagctaccactctgcggcgatgctcactctttcagagcgtaaagttctgcgccttctggcgaaggggtggggaataaaccagatcgccgcgctgttgaaaaagagtaataagacgatcagcgcgcagaaaaacagcgcaatgcgtcgcttatctctacgcagcaacgctgaaatgtatgcctggatcaacagcgcgcagggaatgcaagagctgaatatcaattcagcttacggggagcaaatggaatggaaaaaaatagtacaacccgccatgtcgccatcgtagaaaaatgcgtgatgacggaaatggcatggcgctatatctttagtcgtgaagataatcgccgttatcatattcatctgtttaaaaatgtcagtatgctcagagcggcggaaataccgtttccctggtcaaccattattttttctctttcgggaagtcgttcttcacgagccgagagtctgctctttgttcatgaaatggcgcggtgccggccggaagtccaaacgattattctggctaataatgaaagtgaaatgcacctgatcggccatcttatgccggcctgtttgcacggcatactgaataaatccgcgccgcgacgcgggctacaggagcgtttgctgcagctactggacaatcatcatctcagcggcagcgaacaattttgcgacagagaggcgtgcaacgatccgctaagcccgacggagcacgccatccttcggtatatgtcgtggggatattcgctttctgatattgcgatacagctcaaccggaatattaaaacgatccgcgcgcataagtttaacgccatgaccaagctcggagttcgctcagacattggtttattaaacgcggcggatatcctgttgcatttaccgctcaatagtacgaccagcgccgttaaacaggtagcgtaatgcggctataaacacacatctacccatgttgcatcggtgagctgcgccatgcgttctggttcaatgcgaaccgcgctatggatggctcccgctgcgggtagtacttcctgataatgtctgagagagacgtcgcagtagactgccagcggattttccagaccaaacgggcaaacgccgccgaccggatgaccggtccaggtaaccacttcatcgctgcttagcatgcgtgctttcgcgccaaaggtctctttcagctttttattatccagccgcgcatcgcccctggcgacgatcagtacaatcttatctttgatcttgagcgacagcgttttggcaatttgccccggctcaacgttgtgtgcggcagcggcaagtgcgacggtggcggtactctgatttaactcaataatttcgatatcgggggcgtgttcggcaaaaaactgccgtacagactgcagactcattggattctcctgatttaagcctggttaaatctgtcacaagcctggcggagtgtaaatatcagcgcggacaatccagattctttctattttgtcgatctccttcacaatcgccgtaaccggttactgtaaccggttgcggttatctgcattgagatgaatactggaacagtcacttctccttttatttataaaaaaagagccgtgtatgaatcgttgcctcatgagcagtatagccggttgcacatccgccagcggcctgctgcgtcaaaaagcggtcatcgtaacggcagggtaatcgttgttgggccagtatcaatagcctgtcaggagggctactatgtctgctaaccatgctgcgtttaatttgatatttcgctttgtagaaaattacataagccccatagcagggcggatctcgtcgcagcgccacgtcatggctatccgtgacggatttatctcagcgatgccgtttatgatcgtcggatcgttcctgttagtgtttgcttatccaccgttctcaccggataccacctggggttttgcccgcgcctggctggatctggcgaaagagtttgaggggcgtattctgaccccctttgatatgacgatggggattatgtcgatctacatttgcgcggcaatctcctataacctcggtaagcattacgagaaatccaatcagctcgatccctttatgtgcgcaatgctgtcgatcatggcctttttgctgattgccgcgccgaaaaccaatggcacgctgccggtggatagcctcggggggaccgggatctttaccgccattctggtggcgatctactgcgtggagatgatgcgtttcttgaaagcgcacaacattgggatccgcttgccggaccaggttccgccgatgatcaaaaactcgtttgatctgttgatcccggtgctggtggtcgtgctgacgctctatccgctgagcctgtttatccagcaccattttgacatgctgatcccgcaggccattatggccattttcaagccgctggtttcggcagccgactctctgccggcaattctgttggcggtgctgatcggccacctgctgtggtttgccgggatccacggtgcggcgatcgtgtccgggatgctgcagatgttctggctgactaacctcggtatgaaccagcaggcgctggcccagggcgcgcctctgccgcatatctttatggaggcgttctggaccttctttatcgtggtcggaggttccggggcgaccatgggactggtgttctgttatctgcgcagccgttcagcgcatttgcgctccattggtcgtttgagcgtggtgccaagcctgttcaatatcaacgagccggtgatctttgggacgcctatcgtcatgaacccagtgttctttattccgttcctgctggcgccgatggtgaacgcggtactggcctgggcggcaatgaagctggatctgattggccgcgtcatctccgtcgtaccatggacggcgccggcgccaattggcggcgcctgggcgctgggctgggatttccgggcggcgattctggtcattgttctggcctgcgtgtcggcaatcatctacttcccattctttaaggtatatgagaaacagctgcttgctcaggaagcggaagaggccgagcgggcggagcaggagagtcaacagaccgcataaatagcaacgggcggtaaaggccgcccgttacttttcaggtaagtggtaattatttaagcgtacagtcgccgcactgttggacatccggcaggcgatagcgctgacagcaggtgcgtcggactaactgcccttcacgcagcatcaccgttcgccacagcgggttatcctggccatcggcgagttgtttttcaaaaaaacagtgctgacgtagcgcggcaagccgctcatcacccagcagcgcgcgcatttccccaagataccagttaatcagatagccggtattgctccagataagtttgctattgatttcgcccgtcgctgccagcgcctcaacaaccggctgcagggtgcgcgttaccagggcatccattcgcgcctgcggtgaaagcctctcgatgtcggcatcgctatgcacatcaatccagaagcaggccgcccggccgctttcatgaaattcgacatggaaatgttctggcgccaggctgaggccttgcggttcattgagcagcgccagcatcagcggcggcaccagcagaccgatataccattgcgcccagagcgagagcagaggcttctgttcccgaggcagcgtcggctgatgacgatagatatgatcggaccaggtggccagcagggagcgcaaggcgatgggttgcgaccattcggcaagcgttaacgcgtgccgtggggcgggttcgtcaagtcgcaggaaatcaagcaggtgtggacgcagggtggcgattttttcccgaatactctccgccagggcatgctcagccgtcggcaaaggagcccgccagataagttcatcgctgagaggaagggaacgccaggccattcgatttccagatacaaatctaaatgataatgattactgatattagttgcttgcaggcggcatggcaaggcttttatcggcgccgcgatgtcgcagcgcgcgcaggtcaactggcaagaataatgttgcggcctttattttttgcctcatagagtgcgccgtcggcgcgcgccagcgcttgttcaatgttgtcattaatgagcggcgtcaggccaatactgatggtgacgttggtggcgacgctttcattaaacatatgcgggatcttcaggtcatagacccgctgacgtatacgttcggctgtcttccaggccgtttcttcgctgctattggtcagcagcaccataaactcctctccaccaaagcgggcgacaatatcgcgtgagcgtacagcgttgcgaatggcagcagagacgcgaataagcgcctggtcacctatcatatgaccatagtgatcgttataggccttgaagtgatcgatatcgaggagcagcacgtagtggttgtcgccgtccagcgccagcagggtatcgaggcggttctgcagtccgcggcgattatacaaaccggtcaggggatcgagcatactgagatcgttgagcgtattgcgttcatgcatcagtttatccattaaaccctgcgtaaaggcatcgctgcgcttctggataatattttgcagggtaataccggctataggcagcataaagcagtaagtcatacgcaaccattgttccccctccgccattatcaggcaggcaaggaaagttggtaaagagtggagggtaaaggcagtgatattattggaaaaagcgatggtgccgataaacagaatgcttaatagggcgatcaccagatagttaaaatgcggcggtgtcaatagcatcgcttttgtcactacgtgccatgcccatagcatgccaaataacaacgagatagtgggaatatttattttcgattgcggccatttccagtgccagagcagcagcagcccgctgcagacgacgatcagggcgcagggcagcgtaaaacgaactaccgtaaataggggggtgaccagcgacagcgaggaagaaatgaaatttagcagtaaaaaaagccgtaaggaatattgatatttttgtgcgtaatgtgctcgccaggtttgtgcagtcatatcggaagaatcattattagtcgttaaatttcaaaatgatgaaagccaaaaatgaagagtctgataacaatgtgcaaaaaaaggttatttgcaaaataagcaaaatatttaatatatatcgataatccgcttaatttatcaccttcatgaatgtatgtcattaccgcgaacgtaaagaaaaaggggcagagcacgtcgcaaatgacaaatgataaagattatcatatgatattggttatcattatcgttgtgagaggtgaaaccatgctgcagcgagcattaggaagcggctggggagtgatgattcccggcgcgctaattgtcgctctcgggtatgccggagtgtcggctgacgtatggcgggtactggtcgcggtgggcatgctgatgtccgcggcgatgatctggcatcgtcaattgcgccattttatcctgctgccatcgtgtgtcgcgttgatcggcggaataatgctgatgattgtggatattaaactgagaggataatgccgggagagggaagaatattggtgcgaggggggggacttgaacccccacgtccgtaaggacactaacacctgaagctagcgcgtctaccaattccgccaccttcgcacagtattctttctttgggatattgcctcgttggtgcgaggggggggacttgaacccccacgtccgtaaggacactaacacctgaagctagcgcgtctaccaattccgccaccttcgcccagtgcgagcaatatcttcgtggattatggtgcgaggggggggacttgaacccccacgtccgtaaggacactaacacctgaagctagcgcgtctaccaattccgccaccttcgcataccatcgatactctgaaagtatcgttaccacggaggcgcattctagtggttttcggcgacacgtcaatagttaattatgcaggttgtatcgattgctgcaaaaatgggcggatttgcccgcgggaagcgccagcggtaccaggagcgggccgccggcgtgaaaagacgattattttttcgcctgacgggtcataatggtgcgatagaccttaaagcgcccggtctgggcgatcacctcatggaagccgaacgtctcatccagcacctgcggatacggcaggaaggcgttggcgacaatgcgcagctcgccgccgctgttcagatggcgaaccgcgccgcggatcagcgcctgggcggcttcgagactggtctgcaggccgtcatggaatggcgggttggagatgatcatgtcgaagcgaccattgacctcggagaagacgttgctggcaaacacatcgccagccaggccgttggcggcaagcgtcgcgcggctggcttcaaccgccggggcgctgacgtcgcacagggtgaggcgcactttcggtgaatggctggccagcgcggcggccagcacgcccgcgccgcagccgacgtccagcactttccctttggtatgcggctcgagggtggagagcagcagctggctgccgacgtccagaccgtcgcggctgaagacgcccggcagggtttttatcgtcagattatccagtgtgtattcgccccagaatgcgtcggcgtcgaaggtcggctgcttttccagacggccatgatagaggccacagcggcgggcgctatccactttgtttaatggcgcgtattcagccagcatctgctccgcgctgcggacgccgctgcggttttcaccgacgacgaaaatgtcgcttcccaccggcagcagagagagcaggttcatcagctggaactgcgcctctggtttgttctttggccagtagtagatcagggtgtcgcattcggcgacgtcagcggcctcagccactaagctaaaacggacggtgtcacccatctggcggttgaggacctgccagtggtggaactgttgggtatgggcgcggctggccgcggtatccagacgcgcaggcaggtcatcctgcaggtcaccggcaaacagaacgcgggcggactcgaaatcatcactgtggcgcagcaagacttcacttgccggggtaaaagcggacatgaaacactccttcattaagactggcgccgattatagtagtttgttggcgcagatacgacggatttgctatattgcgcgcttgtttaacaggagtgtttcgctatgacatcccgacgagactggcaattacagcagctgggcattacccagtggtcgctgcgccgaccgggggcgttgcagggcgaaatcgctatctcgcttcctgaccatattcgtctggtgatggtggcggaaaccccgccgtcgctgacagagccgctgattggcgacatattacgcgcgctggccgtgacgccagatcaggtcctgcagctgaccccggagcgggtggcgatgctgccgcaggacagccgctgcaacagctggcggttgggcacagaggcgtcgctgccgctggcgggcgcccaggtgtccacccccgcttttgatgaactccagaccagcgcgccggctcgcagggcgctctggcaacaaatctgcgcacatgaacacgatttctaccctcagcacggctgatttaaccagagcctggcacatcgaaaaacgcgcccacgctttcccgtggagcgaacagactctggccagtaaccagggggagcgctatcgcaactatcagctatcggtagatggcgaaatggcggctttcgccattacgcaagtggtgctggatgaggcgacgctgttcaatatcgccgtcgatcccgcgtaccagcgccgcggcctggggcgagcgctgctggagcatgtcattgatgaagtcgaaaaactcggcgtcgtcacgctgtggctggaggtgcgagcatccaacgttgccgccatcgcgctgtatgagagcgtaggtttcaatgaggcaaccatccgccgcaactactatcctacggccgacggacgcgaagacgccattattatggctctgccaatcagtatgtaacacaaggtgatacgatgaaatgggactggattttctttgatgccgatgaaacgctgtttacgtttgattctttcagcggcttgcagcggatgtttctcgactacagcgtgacctttaccgccgaagattttcaggactatcaggccgtgaacaagccgctatgggtggattaccaaaacggcgccatcacctcgctgcagctgcagcaccagcgttttgacagctgggcggaacgtttgaatgtgccgcccggggaactcaacgacgcgtttatgaatgcgatggcggaaatctgtgccccgttgccgggcgcggtctcgctgctcaacgcgctgcagggcaaggtcagaatgggcatcatcaccaacggctttacctcgctgcagcagactcgtctggagcggacaggtttacgcgatcactttgatttgctgattatttctgaacaggtgggtgtcgccaagccggacgcgcgtattttcgattatgcgctggcgcaggcgggtaacccaccgcgctcgcgggtgctgatggtcggtgataccgccgagtcggatattcgcggcggcgtgaacgccggactggcgacctgctggctcaatgcgcatcagcgcgagctgccggcggatctcgagccggactggacggtgacctcgttaagcgaactggagcagctcctgtgtaaacactgattgcctcccccccgttgatgggtaaaatagccgcaatttttcgtattccacatgcgtggcccatggccgcgtttacttagaagattaattatgacgttgtctccttatctgcaagaggtggccaaacgccgcacttttgccattatttctcacccggatgccggtaagaccactatcaccgaaaaggtgctgctgttcggacaggcgattcagaccgccggtacagtaaaaggtcgtggttccagccagcacgcgaaatccgactggatggagatggaaaagcagcgtggtatctcgatcaccacctcggtaatgcagttcccgtatcatgactgcctggtgaacctgctggataccccggggcacgaagacttctccgaagatacctaccgtaccctgacggcggtggactgctgcctgatggtgattgacgcggcaaaaggcgtcgaagatcggacccgtaagctgatggaagtcacccgtctgcgcgatacgccgatcctcacctttatgaacaaactcgaccgtgatatccgcgatccgatggagctgctggatgaagtcgagaacgagctgaaaatcggctgcgcgccgattacctggcctatcggctgcggcaagctgttcaaaggcgtttatcatctctacaaagacgaaacctacctgtatcagaccggtaaaggccacaccatccaggaagtgcgtatcgtgaaggggctcaacaacccggatctcgacgcggcggtgggggaagacctggcgcagcagctgcgtgacgagctggagctggtgcagggggcgtcgaacgagttcgataaagatctgttcctggccggggaaatcaccccggtcttcttcggaaccgcgttaggtaacttcggcgttgaccatatgctggatggcctggtggagtgggccccggcgccgatgccgcgcaacaccgacacgcgtgaagtcaccgccacggaagagaaattcaccggcttcgtgtttaaaattcaggccaacatggatccgaaacaccgcgaccgcgtggctttcatgcgggtggtgtccggcaaatatgaaaaaggcatgaagctgcgtcaggtgcgtatcggcaaggacgtagtgatttccgacgcgctgacctttatggcgggcgatcgctcgcacgttgaagaagcgtacccaggcgatatcatcggcctgcataaccacggcaccattcagattggcgatacctttacccagggcgagatgatgaagttcaccggtattccgaacttcgcgccggaactgttccgtcgtattcgcctgaaggatccgctgaagcagaaacagctgctgaaagggctggttcagctctctgaagagggcgcggtccaggtcttccgcccgatcgctaataacgatctgatcgttggcgccgtcggcgtgctgcagtttgacgtggtggtagcgcgtctgaaaagcgaatacaacgtggaagcgatttacgaatcggtcaacgtggccaccgcgcgctgggttgaatctactgacgtgaagaagttcgaagagttcaagcggaaaaatgaagttcagctggcgctggatggcggcgataacctgacctacatcgccccgacaatggtcaacctgaacctgacgcaggagcgttaccctgacgtggtgttccgcaaaacgcgcgagcactaatccctgacgaagcgcggcgcaggccgcgcttttttctggttacgctcccgttcccttccttctggaaagttcttaaaacaccgctaattcgtctgttttttatccatatcctccgcaaccccttcgtctgtctactatatttaattcgtgtttttaaaaatgctggcgtaattcactgcgataagacgccagcgctggtgaaaaaacgaggacataacgatgaccagactaaagaatgccaatatgttgctggcgctcttcttaggcttagccgcgttgaacgcctcggcagagacggaaaaaacaacggtagacagtgcgaagtcggctgccagcaatgcgggagaggcggtagataattcgattaacaaagtcggcgattttatggatgacagtaccattaccgcacgggtaaaagcggcgctgatcgaccataaagatattaactccggcgatatttcggtgaaaacggagaataaagtggtcaccctcagcggcgacgtcaccagtgctgaacagaaaagtcaggcactgagcgtagcgaaagaggtcaaaggcgtctcacacgttaacgacaagctgacggtccatcataaatcatcgagcgagacggcgacgctgaaaggctatgccggggataccgccattaccagcgaagtgaaagccaagctgctggcggatgacattgtcccttcgcgcaatgtgaaagtcgaaaccaacgccggcgcggtacatctgaccggtacggtggcttccgcggcgcaggcggagcgtgccgcagagattgcgaaagcggtctccggtgtgaaaagcgtgcgcaacgatcttagcgttaagtaaaccgagttattaacaaaagtgttgtctggccaaggttgccgaacgaatagcagcatccactgagcgatgagctatacagaaagggtgcgcaaaccgctgttcaccgtccattatggtaaggagaaaagtatgtttcgatggggaattatttttctggtcattgcattaattgctgcggctctgggctttggtggtctggcgggtacggccgctggcgctgcgaaaatcgtctttgtcgtcgggattatcctgttcctggtgagcctgtttacaggacgcagacgtccttaggcggcccgcgatgcgggcgatactgaagcctaagcatttttactgacacgtcatcttacacaaagccagtcctgaggactggctttcgcggtttaagcggcgggcaaattgcgttaccttgtcaggagaagatcaatcgaacaggaaagcagggtggggcaacgcattcccgtcacgctgggcaatatcgccccgctggcggttaaacccttccgaccaggcaagctggcgctggtatgcgaaggcggaggacagcgagggatttttactgccggggtgctggacgaatttatgcgcgccggatttaacccctttgacctgatgctgggtacttcagccggtgcgcaaaacctctccgcctacatgtgtaatcagcaaggctatgcccgcaaagttatcacccgctacaccacttcacgccagtttttcgatccgatgcgctttgtgcgcggcggcaaccttatcgatctcgactggctggttgaggccacttcgcagcaaatgccgcttgccatgaactatgccgaagcgcagttcgcgttggggaaagagctgtggctatgcgcttgccgcggtgacgattactccgccagctatttttcgccgacgccgcaaacgtggctggatctgatccgcgcctccagcgccatccccggcttttatcgcagcggcgtgttgctcgacggcgttagctacctggacggcggcgtcagcgatgcgatcccggtgcaggaggcggcccgccgcggcgcccagaccatcgtggtgatccgtaccgtcccttcgcagatgttttataccccgcagtggttcaagcggatggagcgctggctgggagagagtagtctgcaaccgctggtcaatttggtgcatcatcacgaaaccacctaccgcgccatccagcagttcatcgagaaaccgccgggtaagttgcggatcttcgaaatctatccgcagcggccgctgcgcagcatggcgcttggcagccgactaccggcgctgctggaggactacaaaaccgggcgccagtgcggccgttatttcctggcaacggtgggtaaactactggccgaccagccgccgctgctgcgccacgcgccgcgtattgcccggcccgcgccggtggtggtgccgccggtgccggtggccaatgaagcgccccaggcgaccatcattcctgcgccccaggcgaatgaccccagttttgatcatgaggatctggcgtgacgcaccgttttatcgatacccactgtcactttgattttccccccttcgcggcagatgaggtcgccagcctggcgcgtgcggcgcaggccggcgtcgagcgaattatcgttccagccatctctgctgagcgttttagccgcgtgctgacgctggcagctcagcacgaagcgctgtacgccgcgctgggtatgcatccgatcgtcatcgaagagcatactgatgagggactggcgcagctggaagccttgatggcgcagcggccgcctaaactggtggcggtgggagagattggcctcgatctttatcgcgacgatccgcagtttgatcgtcagcaggcgctgctggaagcgcagctgaggctggcgaagcgttacgatctgccggtgatcctccactccagacgcacccacgataagctggcgatgctgctgaaaaaacatgccctgccgcgtaccggagtcatccatggctttgccggcagcctgcagcaggccgagcgcttcgttcagcttggctataagatcggcgttggcggcaccattacctatccccgcgccagtaaaacccgtgaagtgatggcgcgtctgccgctttccgctctgctgctggagaccgatgcgccggatatgccgctaaatggctttcagggacagcccaatcgaccggaacaagctgcacgggtatttgaggcgctgtgtgaactgcgtccggagtcgccggcagccatagaagaagggatcatgcacaatacgctcgccttgttttcccttcccccggtctctgtatggtgatcgatttctcataattgtccatccatatcattgatttgcttaaaatgtgtgaagccagacgggcaggatagtttcaggccgatataatcacgcggttagtactggactatcaaaaacacagggaatctgtatgcaaatcctcatgggacttatcggcatggtggcgctattggccattgctgtgctgctctccaataaccgaaaagccattaacctgcgcaccgtgctcggcgcctggataatccaggtgggtatcggcgcgttaatattgtatgtaccggccgggcgcgcggcgctattagcgatgtcgaatggcgtcgccagcgttattgcctacggcaatgaagggattagtttcatcttcggcgggctggtctccgataaaatgttcgaggtgtttggcggcggcggcttcgtctttgccctgcgcgtgctgccggtgatcgtcttcttctcgtcgctgattgccgtgctttactacctgggcattatgcaactggtcattcgcattctcggcggcgcgctgcgggcagtgctgaagacctcacgtaccgaatcgctgtcggccacggcgaacatctttgttggccagaccgaagcgccgctggtggtgcgtccttatatcgccaccatgactcgctcggagctgtttgcggtcatgtgcggcggcctggcctcggtggcgggctcggtactggcgggctatgcgcagatgggcgttccgctggagtaccttattgccgcgtcgtttatggcggcgccgggaggcctgctgtttgccaaaattatcgtaccggaaacggaaaaaccggacgataacccggctcatgacagccaaagcgctgacgcggataaaccggccaacgtgctggatgccgccgcctccggcgccgcgtctggtatgcaactggcgctcaacgtcggcgcgatgctgctggcgtttattgcgctgatcgccctgctgaacggcatactctccggcgtcggcggctggtttaaccatcctgagctgtcgctgcagatgatcctcggctggatcttctcacccctggcgtgggtgattggcgtgccgtggcacgaagcgacggtggcggggtcgtttatcggccagaagctgatcattaacgagttcgtggcctacatgaactttggcgaatatttaaaggcggatgccgaagtggcggcggccgggctgcaggtcatttcagatcacaccaaagccattatctctttcgcgctgtgcggctttgccaacctgtcatcgatcgccattctgattggcggactcgggggaatggcgcccaaccggcggcaggatatcgctcagcttgggctacgtgcggtagcggcggggacgctatccaacctgatgagcgccaccatcgccggggtttttctcgccctgtaagcctgtctcctgaaccagcggccaccgtgccgctggtgttgctgtaaatgtgataattccatcaccactctcttttttgaaaaatagtttatatttcaatttgtagcgttttaattgcccgtaaattgggcaaaatgtgcgccacgctatcgagtgtaattgttattgtgtgttagaattatcacatcctcatcggcggcgtggtatctattatgcttaagaggggactaacgataattgctacggtattgagtggtaatttgtgattttaatcacgttacagtaatgcaaattcgtaagtagttttcattaactgtgatgaatgtcgaagtgtaacgacgagcgaatgttacaatagtaacagactcgcaaggtgaacaaactattgatccggcacgacgccggcggagtatgaaatgactgatttaaaagcaagcagcctgcgcgcgttaaaactgatggacctgaccactctgaatgacgacgacaccaatgagaaagtcattgccctgtgtcatcaggcgaaaacgccggtgggtaacaccgcggcggtctgcatctacccgcgcttcatcccgatcgcccgtaaaacgctgaatgagcaggggacgccggatattcgcatcgccacggtcaccaacttcccgcacgggaatgacgatatcgacattgcgctggcggaaacccgcgcggcgatcgcttacggcgctgacgaagtggacgtggtcttcccgtaccgcgcgctgatcgccggcaacgagcaggtcggtttcgagctggtgaaagcctgtaaggaagcctgtgcggcggctaacgtgctgctgaaagtgatcatcgaaaccggtgagctgaaagaagaagcgctgatccgtaaagcgtctgaaatctctatcaaagccggggccgatttcatcaaaacctcgaccggtaaagtgccggtaaatgccacgccggaaagcgcgcgcatcatgatggaagtgatccgcgatatgggcgttgagaaaaccgttggcttcaaaccggcgggcggcgtgcgcagcgcggaagacgcgcagcagttcctggcgatcgctgatgaactgttcggcgccgactgggccgattctcgtcactatcgttttggcgcatccagcctgctggctagcctgttgaaagccctgggtcacggcgacggcaagagcgccagcagctactaatcccttgatttgccggatggcgctgcgcttatccggcctacgaattgatgcctgtaggccggataaggcgctcgcgccgtcatccggcaatttattctctttgggaggttaccgtgtttctcgcacaagaaattattcgtaaaaaacgtgatggtcaggcattaagcgatgaagagatccgctttttcatcaacggcatccgcgacaatactatctctgaagggcagatcgccgcgctggcgatgaccatcttcttccacgatatgtctatgccggagcgcgtttcgctgaccatggcgatgcgggattccggtaccgttctggactggaaaagcctcaaccttaacggtccgatcgtcgataaacactctaccggcggcgtcggggatgtcacttcgctgatgctggggccgatggtggccgcctgcggtggttacgtaccgatgatctccggccgcggcctcggccataccggcggtacgctggacaaactggaagcgatcccgggcttcgatatcttcccggacgacaaccgcttccgcgagattataaaagatgttggcgtggcaattatcgggcagaccagctcccttgccccggccgacaaacgtttctatgccacccgcgatattaccgcgacggtggactccatcccgctgattaccgcctcgattctggcgaagaagctggcggaagggctggatgcgctggtgatggacgtcaaagtcggcagcggcgcctttatgccgacttatgaactctctgccgcgctggccgaagcgatcgtgggtgtcgccaacggcgccggcgtgcgcaccaccgcgctgctgaccgatatgaatcaggtactggcctccagcgccggcaacgccgttgaagttcgcgaagcggtgcagttcctgaccggcgaatatcgcaacccgcgcctgttcgacgtgacaatggcgctgtgtgtggaaatgctgatctccggcaagctggcggcggacgatgccgaggcgcgcgcgaagctgcaggcggtgctggataacggtaaagcggcggaagtgtttggccgcatggtcgcggcgcagaaagggccgagcgactttgtcgagaattatgctaattatctgccgacggcgatgctgagcaaagcagtctatgctgataccgaaggttttatcagcgcgatggatactcgcgcgctgggcatggcagtggtttctatgggcggcggccgccgtcaggcatcggacaccattgactatagcgttggctttaccgagatggcgcgtctgggtgaccgcgtcgacggacagcgtccgctggcggtgatccatgccaaagacgagaacagctggcaggaggccgcgaaagcggtcaaagcggccattaaactggacgataaagccccggaaattacaccgacagtctatcgccgtatcactgaatagcgatatactgatctgatcgcttttttgcagcgcaagatgtatggagaacaagatgaaacgtgcatttatcatggtgctggactcctttgggattggcgcaacggaagacgcagaccgctttggcgacgtcggcgccgatacgctgggccacattgcagaagcctgcgccaaaggcgaggctgaccacggccgcaaaggcccgctgaatttaccgaacctgacccgtctgggtctggtgaaagcgcatgaaggctccaccggtaaaattgccgcgggtatggatggcaatgccgaagtgattggcgcctatgcctgggcgcatgaactttcttccggtaaagataccccgtccggccactgggaaatcgccggcgtgccggtgctgtttgactggggctacttcagcgaccaggaaaacagtttcccgcaggagctgctggataagctggtgaaacgcgccaacctgccgggctatctcggcaactgccactcctccgggacggtgatcctcgatcagctcggcgaagagcatatgaaaaccgggaaaccgatcttctatacctccgctgactcggtgttccagatcgcctgccacgaagagacctttggcctcgacaagctgtatgagctgtgcgaaatcgcgcgtgaagagctgaccgaaggcggctataacattggtcgcgtgattgctcgtcctttcgtgggcgacaaagccggtaacttccagcgtaccggtaaccgtcacgacctggcggtagagccgccggcgccgaccgtgctgcagaagctggtcgacgagaaaaacggccacgtggtgtccgtgggtaaaatcgccgatatctacgccaactgcggtatcactaagaaagtgaaagccaccgggctggacgcgctgttcgacgcgaccatcaaagagatgaaggaagcgggcgacgagactatcgtcttcactaacttcgtcgattttgactcctcctggggccaccgtcgtgacgtcgctggctacgcggcgggtctggagctgttcgaccgccgtctgccggagctgatggagctggttggtgaggacgacatcctgatcctcaccgccgaccacggctgcgacccgacctggactggtactgaccacacccgcgagcatatcccggtgctggtgtacggcccgaaagtgaaaccaggttcgctcggtcaccgtgaaaccttcgcggacatcggccagactattgcgaaatactttggtacgtctgacatggaatatggcaaagccatgttctgaggtcattgcccggtggcgcacagcgatccgggcctacgatttgtaggccgggtaaggcgtagccgccacccggcaaaaacaacaatgtaaaaggaactgaagatggcaactcctcacattaacgcagaaatgggcgatttcgctgacgtcgttttgatgccgggcgacccgctgcgcgcgaagcacattgcagaaaccttcctcgaagacgtgcgtgaagtgaacaacgtgcgcggcatgctgggcttcaccggtacctataaaggccgcaaaatctccgtgatgggccacgggatgggtatcccgtcctgctctatctacaccaaagagctgatcaccgatttcggcgtgaagaaaatcatccgcgtgggatcctgcggcgcggtgcgtgaagatgtcaaactgcgtgacgtggtgatcggcatgggcgcgtgcaccgactctaaagtgaaccgtctgcgtttcaaagaccatgattttgcggcgattgccgatttcggcatggtgcgtaatgcggtagacgcggcgaaagcgctgggcgttgacgcgcgcgtcggcaacatcttctccgcagacctgttctatacgccggacccgtccatgttcgacgtgatggaaaaatacggcattctgggcgtggaaatggaagcggcgggtatctacggcgtggcggcggagttcggcgcgaaagcgctgaccatctgcaccgtctccgaccacatccgtacccacgagcagaccactgccgctgaacgtcagaccacgttcaacgacatgatcaaaatcgcactggaatccgtgctgctgggcgataaagagtaagagctgttgtgccgggtggcggcttcgtctgacccggcctacggttttccaggcccgctaagcgcagcgggcttttttatcagcgcactgcgccggcaatccacgccgacagttctttcagttccgcttcctgctccgggaaatcgccgaccagcgcctcgcactgctgctgtaatacttctgcccgatactgacagccgactaagcgtgccgccagggcctccagcggcgccgggttcaggctatcggtaaaggcctgcgcgcgggtgatatgccctttttcgacgtcaaaatgcagctcaacgccgccccagcgaaagcgctcgtccagaagatgagagaaggccggcgcctggccgaagttccactcccagctgctctgacgggcgaatgtctcagcaaaatttggtagatccggcgtgttgtccggggagatcacctcggcgtccacccgttcgccgtaatggctgaagaatgcttcctggatcgcctcgcaaacttgctgatgggtaatgcccggcagcagctcaaccaggttcgccacccgtccgcgcaccgaggtaatgcctttagcctgcagctttttctggtccgggttgaggtagttggcgagacggcttaaatcggcgttgagtagcagggtaccgtgatgaaaaccgcggtccatggtttcacgataggcggagccggagactttgcggtcgccgctgtcggttttgaccaccagatcgttgcgcccggaggcttcggcggttacgccgagtgaattaagcgccgccagcacaatagcggtggagacggttttgtcgtactccggtttgcctgccataaaggtaaagcaggtattgccgaggtcgtggaacaccgcgccgccgccgctgctgcgacgggccagccgcacatggtcttcctccatgcggcgggtattacactccttccacgggttctgcgcgcggccgatgaccacggtatcggcattgcgccacaggaacagcacccgctgggtggcgggcatctggcggaaaatgcactcctcgaccgccaggttgaaccacgggtcgtaagagtcagagagcaggaggcgcaatgtggacattatagatttcctttcttttcatcgtcttcatcctcaaccggcttgttggcggtgagcaggaagggcgattgctgccagcgggtgcgtttgccctgcagcagcgtgcgggtcagcaccacgccgatagccagggacagcaacagcatcaggcgtaagatattggtggtattatccacctgcttcgcctcggtcgccagggtatgagtatcgagggtcagacgcaggtagcccagcgggccgttttttcctggcaccggttcgacaatctgctggttgaagtagccgccggcttttttaccatccagcgccagccggtcgcgaacctcgacgctttcgccagagcgcgccaccaggtcgccctgttcgtcatataccccggcgtccaggacgcggctgttatgggttagctgggtcaacagctgattgatgcgcttctcgtcaggcgtctcgctgcgcatcagcggcgcgagattcagcaccacctgctgcgccagcgtgcgggccagctcttccagctgcggattgcgttgtttctgactgttctgactgaaccacgaagcgccctgcatcagcgcgacgagtagggcgagacagataagaacaatgaccgcacgatgcagccggaatttcagttttgcgcgaaccatattccacctttgaaaatttgcagcttaatgttgccagaagcgctggttacaaggtagcctcatgcgttattttcctcgcctgaatgaagagatgtggagccgtaatgcctaacagtttgacctggtgcgacctgcctgaagacgtttccctgtggcctgggttgccgctttccctgagcggcgacgaggtcatgccgctggattatcacgccgggcgcagcggctggctgctgtatggtcgcggtctggataaacgtcggctgacggcgtggcagcgtgagctgggcgccgcgttagtgatcgttgcctcctgggtggtcgaggattaccaggtgatccgcctggccggttcgctgactccccgtgcgacgcgactggcgcatgaggcggggctggacgtcgcgccattgggtaaaattccccatttgcgcaccccgggcctgctggtgatggacatggactccacggcgattcagatcgaatgcatcgatgagatcgcgaaactggccggcaccggcgagctggtctcggaagtgaccgagcgggcgatgcgtggcgagctggacttcaccgccagcctgcgccagcgcgtggcgacgctgaaagacgccgatgccagtattttgctgcaggttcgcgacgcgctgccgctgatgccgggcctggcgcagctggtgctcaagctggaaacgctgggctggaaagtggcgatcgcctccggcggtttcaccttctttgccgagtatctgcgcgacaaactgcatctcgacgcggtattcgccaatgagctggagatccgcgacggcaagctcaccggcaacgtgctcggcgatatcgtcgatgcgaaatataaagccaatacgttgcgcaagctggcggaaaagtatgagatcccaacggcgcaaaccgtggctatcggcgatggcgccaacgacctgccgatgattaaggcagcagggcttggcatcgcctatcacgcgaagcccaaagtgaatgaacaggcggaagtgactatccgccacgctgacctgatgggggtattctgtattctctcgggcagcatgaaccaaaagtaagaggtaaacgtggcgaaagctccaaaacgcgcatttgtctgtaatgaatgtggtgcggattatccgcgctggcaggggcagtgcagcgcctgccatgcctggaacaccatcaccgagatgcgcatcgccgcgtcgccgcaggtggcgagaaacgagcgtctttcaggctatgccggtaacgccggcgtgtcgaaggtgcagaagctgtcagatatcagcctggaggcgctgccgcgtttctccaccggctttaaagaatttgaccgcgtgctgggcggcggcgtggtgccgggcagcgcgatcctgattggcggcaaccccggcgcgggcaaatcgacgctgctgctgcaaaccctctgcaaactggcggaagggatgaaaaccctgtacgtcaccggggaggagtccctgcagcaggtggcgatgcgcgcccatcgtctcgggttgccaacggccaacctgaacatgctctcggaaaccagcattgagcagatctgtcagatcgccgatgaagaaaagccgcagctgatggtgatcgactccatccaggtgatgcatatggccgacgtgcagtcgtcgccgggcagcgtcgcccaggtacgggaaaccgcggcctatttgacgcgctttgctaaaactcgcggcgtggcgattgtgatggtcggccacgtcaccaaagacggctcgctggccggtccgaaggtgctggagcactgtatcgactgctcggtgctgctggacggggatgccgactcccgcttccgtacgttgcgcagccataaaaaccgctttggcgcggtgaacgagctgggcgtcttcgccatgaccgagcagggcctgcgtgaagtgagcaacccgtccgctatcttcctcagccggggagatgaaatcacctccggtagctcggtgatggtggtctgggaagggacccgcccgctgctggtggagatccaggcgctggtcgatcactcaatgatgtccaacccgcgccgcgtggcggtggggctggaacagaaccgtctggcgatcctgctggcggtgctgcaccgtcacggcggcctacagatggccgatcaggacgtcttcgtcaatgtggtcggcggggtgaaggtcacggaaaccagcgccgacctggcgctgctgctggcgatggtctccagcctgcgcgaccgtcctctgccgcaggatctggtggtctttggcgaagtggggctggccggggaaattcgcccggtaccgagcggtcaggagcgtatctccgaagcggcgaagcacggcttccgccgcgccatcgtcccggcggccaatgtgccgaaaaaagtgccggaaggcatgcaaatctttggcgtgaaaaagctttcagacgcgctaagcgtttttgacgacttataataagttaaaaggagattagcgatgtcgtcatttgactatttaaaaagcgccattaagcagaaaggctgtaccctgcagcaggtggcggaagccagcggaatgaccaaggggtatcttagccagctgctgaatgccaaaatcaaaagcccgagcgcgcagaagcttgaagcgctgcatcgtttcctcgggctggagtttccccgccgacagaaaagcgtcggggtggtgtttggtaagttttacccactgcataccgggcatatctacctgatacagcgcgcctgtagccaggtcgatgagctgcatatcattatgggctatgacgatacccgcgaccgcgagctgtttgaagagagcgccatgtcgcaacagccgacggtgcctgaccgcctgcgctggctgctgcaaacctttaaatatcagaagaatattcgcatccacgccttcaatgaagaggggatggagccctatccgcacggctgggacgtctggagccatgggatccgcgcttttatgagcgaaaaagggatcgagccgaaccggatctatacctcggaagaggccgatgcgccgcagtaccttgagcatctggggatcgagacggtgcttatcgatcctaagcggacctttatgaatattagcggcgggcagatccgcgagaacccgttccgctactgggaatatattccgacggaagtgaaaccgttctttgtgcggacggtggcgatcctcggcggcgagtcgagcggtaaatcgacgctggtcaataaactcgccaatatcttcaataccaccagcgcctgggaatatggccgggattatgttttttcgcatctcggcggcgatgagatggcgctccagtattcggattacgataaaattgcccttgggcatgcgcagtatattgattttgcggtgaaatatgccaacaaggtggcgttcatcgataccgacttcgtcagcactcaggccttctgtctgaagtacgagggacgtgagcacccgtttgtgcaggcgctgattgatgaataccgcttcgacctggtgatcctgctggagaacaataccccgtgggtggccgatggactgcgcagtcttgggagctcggtggatcgtaaagagtttcagtcgttgctggtatcgctgctgaaagagaacgagatcgaattcgtccatgtgaaggagtcggactacgatgcccggttcctgcgctgcgtcgagctggtgaaacagctgatgggcgagcaggggtaggtgctctgcgggctgtagccctcaccccaaccctctcccaatgggagagggagcaaacattaaaaaaggcaacttgcgttgcctttttgcgttttatttcgcgatacgtttgtacttgattcgcttcggctccagcgcgtcggcgccgagagtgcgtttcttgtactcttcgtactcggtaaagttaccttcgaagaactcaaccttaccttcatcctggtaatccagaatgtgggtggcaatacggtcaaggaaccagcggtcgtgcgagataaccatcgcgcagcccgggaactccagcagggcgttttccagcgcgcgcagggtttcgatatccaggtcgttggttggttcatcgagcagcaggacgttaccgccaacctgcagcagtttcgccaggtgcagacgaccacgttcaccgccggacagctcgccaacgcgtttaccctggtcgacgcctttgaagttaaagcggcccacgtaggcgcggctcggcatctcggtgttgccgatcttcatgatatccaggccgccagacacttcttcccacacggtcttactgttgtccatcgcgtcgcggaactgatcgacggaagccagcttaacggtttcacccagggtgatggtgccggaatcaggctgttcctggccagacatcatgcggaagagggtggatttacccgcgccgttcggaccgatgatgccgacgatagcgcctttcggtaccgagaagctcagatcgtcaatcagaacgcggtcgccgtaggatttgcgcagatggctgacttccagaactttatcgcccagacgcgggcctggcggaatgaacagttcgttagtttcgttacgtttctgatattcaacgttgttaagctcttcaaagcgcgccaggcgggctttgcccttagactgacggcctttcgcgccctggcgaacccactcgagttctttctcgatagatttgcggcgtgcggcttcctgagaagcttcttgcgccagacgctggtctttctgctccagccaggaggagtagttgccttcccacggaataccttcgccgcggtcaagctcgaggatccagccggcgacgttatcaaggaagtaacggtcgtgggtaatcgccaccacggtgccttcgaagtcgtgcaggaagcgttccagccaggcgacggactcggcgtcgaggtggttggtcggttcgtcgagcagcagcatatccggtttttccagcagcagacggcacagcgcgacgcggcggcgttcaccaccggaaagattagcgattttcgcatcccagtccggcaggcgcagggcgtcggccgcgcgctccagctggacgttcaggttgtggccgtcgtgcgcctggataatctcttcgaacttgccttgctgtgcggcaagcttatcgaagtccgcatccggctcggcgtatttggcatagacttcgtccagacccttcagcgcgttaaccacttcggcgaccgcttcttccacggactcgcgcacggtgtgctccgggttgagctgcggctcctgcggcaggtagccgattttgatgccgggctgcggacgcgcttcaccttcgatctcggtgtcgataccggccatgatgcgcagcagggtagatttaccggcgccgttcagaccgagcacaccgattttcgcgccagggaaaaagctgagggagatatttttcaaaatatgacgtttcggcggaaccactttgccgacacgatgcatggtataaacgaattgagccacgttggacttcgcctctttctattttgatagatagttcaaagccgaagtgtagcctttttcgcgcgctaatcccagcgaggcgacaggattcacagaagcgtaaaaaaatgtccaggacatggcgcgtttagcgttgtctgattagcataagtaaagccgcctgccgaaccggcaggggtttttaagcggcacgatgctgcgaaaatgcaccggaaagaggaagagcttgtggaaaaagccaaaaaaatggcgtggcatcttttggctgccagcgttggtttgttgacgttgagtcagctggcgcatgcggattcactggatgaacagcgcagccgctacgcacaaattaagcaggcgtgggataaccggcagatggatgtagtcgaccagctgatgcccacgttaagcacctatcccctgtatccctatttgcagtaccgacagatcaccgacgatctgatgaaccagccggcgctggtggtgaaaaactttattgacgccaatccgacgctgccccctgcgcgttcattacgttcgcgcttcgtgaatgaactggcccggcgcagcgactggcgcggcttgctggcgtttagcccggataagccgaccagcaccgaggcgcagtgcaactattactacgccaagctgagcgtgggacagtcgcaggaggcctggagcggggcgaaagagctgtggctgacgggcaagaatcagcccggcgcctgtgaaccgctgttcagcgcctggcgcgactccggtcagcaggatccgctggcatatctcgaacggatccgcctggcgatgaaggccggcaatatcgggctggtgaaatcgctggcccagcaaatgcccgccaactaccagagcatcgccagcgccgtggtcgccctggctaacgatccaaacagcgtcctcaccttcgcccgcaccaccggggcgacggactttacccgtcagatggccgccgtcgccttcgccagcgtcgcccgccaggacgtggaaaatgcccgcctgatgatcccttcgctggtacaggctcagcagctcaatgaggatcagacccaggaactgcgcgatattgtcgcctggcgcctgatgggtagcgatgtaaccgaagagcaggccatctggcgcgatgacgcaatcatgcgttcgcagtccacgccgctggtggagcggcgggtacggatggcgttggggacgggcgatcgccatggcctcaacacctggctggcgcgcctgccgatggaggcgaaagagaaagacgaatggcgctactggcaggcggatctgctgctggagcgcggcagggatgaggaggcgcaggcgatccttcgctcgttgatgcaacagcgaggcttctacccgatggtcgccgcgcagcgtcttggcgaggagtataccttccgcatcgataaagcctcgggcaccatcgatccggcgctggcctccgggccggagatggcgcgggtacgtgagctgatgtactggaatatggataacaccgcgcgcaccgaatgggccaacctggtcactagtcgcaccaaatcccagcaggcgcagctggcgcgctatgccttcgatcagcactggtgggatctgagcgtgcaggcgacgatcgccggtaagctgtgggatcagctggaagaacgtttcccgctggcctataacgacctgtttgcccgctatgttagcggcaaagatattccgcagagctacgcgatggcgattgcccgtcaggagagcgcctggaacccgaaagtgcgctcgccggtcggcgccagcgggctgatgcagattatgccgggcaccgcgacgcataccgtcagtatgttcagcattcccggctacagcggcccgtcgcagctgttggatccggaaaccaacatcaacatcggcaccagctatctgcagtacgtttatcagcagttcggcaataaccgtatctacgcctcagcggcctataacgccgggccgggccgggtacgcagctggcaggggaacagcgccggacggatcgacgccgtggcgtttgtcgagagtattccgttttcggaaacccgcggctacgtgaagaatgtcctctcctatgacgcctactaccgctactttatggggcagcaggataagatcctcagcgatgcggagtggcgccagcgttactgatcgccgggaagtatgttatgctttgtactcgttgaagagtacattcgacgggcagcgtaagctgcccgtctcaatatggtggcgcgatatgacccaacaatctccctattccgcggccgttgccgaacaacgtcatcaggagtggctgcgctttgttgccctgcttcagcaggcctatgctgaggatctgcatctgccgttgctgcagctgatgctgacgcccgacgagcgcgaagccctgggtacccgggtgcgcattatcgaagagttgctgcgcggcgagatgagccagcgtgagctgaaaaatgagctcggcgccggaattgcgaccattacccgcgggtcgaacagcctgaaatcggcgccggtagagctgcgccagtggctggagcagacgctgctggctagcgataaatagcgttatggaacgggcttagcgccagcacgaccgcctggtggtaaacgctgctgcgggttaatctgccgccggtgaaaaccccaatcgccccctctttacgaccgatctgatcgatgccggtatactgcgacatgaccgggccgagggcttcgccagcgcgaacctgctcaagaataacgtcaggcaacggcagcgtggctgagcgcgcttctccgcgctggctggcgctttcgatgaccacccagctaaaggtgctgtcatcgtcgataccggcttcgatagctacccagaaatcggcatttggccgggcaaggcgcgcattggcgacgcgatttcgtgcgccagcgcgcgtttcctcgctgccgaagggctgttccggcacgccgctctcgacggcgacggactcaatgtggcaggatccttcgccgaaaatctcgtcaaaagcctgcagaattgcctgaattttggcgggattagtggtcgctgagacaacatggtgcataatcaaaacaactcagaataaactaacgtcatcgcagtatactctaaatcaccccgagggcaggcggtaatgcccgaaagcggttgataacgagtccagaacggaaaaaaagcatgttacaagtataccttgttcgccacggtgaaacgcagtggaacgccgagcgacgtattcaggggcagtccgacagcccgctgaccgcccatggtgagcgtcaggcctggcaggtgggcgagcgcgccagaacgctggggatcacccatatcattaccagcgatctggggcgaacccgccgcacagcagaaattatcgccgaagcctgcggctgcagcgtgatcgccgatgcgcgcctgcgcgaactggatatgggggtgctggagaagcgccatatcgactcgctcagcgaagaagaagaaggctggcgtcgccagctggtcaacggcacaccggacggtcgtattccgcagggcgaatcgatgcaggagctcagcgagcgtatgcatgcggcgctggcatcctgtctggaattacccgccggtagccggccgctgctggtgagtcatgggatcgcgctgggctgcctggtgagcacgatattagggctgccggcgtacgctgagcgtcgtctgcggctgcgcaactgctctatttcgcgcgtcgactatcagcaaagcccgtggctggcttccggctgggtggtggaaacggcgggcgacgtctcgcatcttgacgcccccgcaatggacgagctgcagcgttaacggcggatcgggatcagatactcgcagcgcaactgaatcggcgtggcctgatcccggctttcatcttcagggtagaagcgttcaatatccagccccttgcgacgcgtcaggttcagcatcggcatgcaggtgccgtagacggtcaggatgaattcctgcagaccggtacccagcccttcatacgtaaacatgacatactcgccgccctccagggtcactggatgggcatgctgcaggtggccgttagccatctccggcgtcagcgcggtggtatagaatacttcctgctcatcgtctttttccaggctcggacgcggctcatgcagcccgtagagcaccggggggattgacggtgagttgccgaggaagtctcgccagaactggacccgcatctggttacgaaaatcggagatttcctcgagcttacaggtatagctctgggtcacgccaagcagctgagtagggggcagagtgataaactcatgtttcggcagggtaaattcgccaagacgcagcggcgggcgcataccgaacgagctccagtccggcgagcggcggtagagcgccggcgtcagcgagaattgcttcttaaacgctcgggtgaaggtctgctgggagtcgaaacggtactgcagcgcaatatcaaggattggacgggcggtcaggcgtaatgcgacagcagatttcgacaagcggcgcgcgcgaatataggcaccgatggcatggccggtgacatccttaaacattcgctgcaaatgccacttggaataacctgccttcgccgccacattatccagagaaagcggctgatccaggtgaccttccagccagctaaggagatcgcgaataatccctgcttgatccataaaatgtccccatccttaaacacaggtgcctgatattaaagtagcggataatagcattttttgatgttttagcattcagtgttttttttgcttttaaatgcggtaggtcaggggatttgaacgataattttgtaaagctgtgatctataaaccttttctgctaagtgcgtgataatcactcagctatattttttaataatggtaacaatatgaaatacaagaagtttgcgatggggctgctcctgctgagcggtagccagctggctcaggcggagcagattggttccgtggatacggtcttcaaatggttagggccggatcacaaaatcgtcgtcgaagcctttgacgatccggatgtacagaacgtgacctgctatatcagccgggcgaaaaccggtggcatcaaaggcgggctggggctggcggaagatacctctgacgcggcgatttcctgccagcaggtcgggccgattgagctaacggacaaaatcaaaaacggcaaaagccagggcgacgtggtgttccagaagcgcacctcgctggtgtttaaaaaactgcaggtcgtgcgtttctatgatgcgaagcgcaatgcgctggtctatctgacctactcggataaagtggttgatggctcgccgaagaacgccatcagcgccgtgccgatcatgccatggaataaataaacgggagcgcgcatgcagcagccacggatttggttagttgaggatgaacagagtatcgctgataccctggtttacatgctgcagcaggagggcttccaggtcagcgtctttggccgcggtttgcccgcgctggaggcggcggcgcatcaggcgccagatgtcgccatcctcgacgtcggcttgccggatatcagcggcttcgagctctgtcggcgtctgctgacgcgttatccggcgctgccggtgctgtttttgacggcgcgtagcgacgaggtcgataagctgctggggctggaaatcggcgctgacgattacatcgccaagccgttttcaccacgcgaagtctgcgcgcgggtgcgaaccgtgctgcggcggctgcagaagtttgccgcgccatcgccggtggtacgcgtcggcgagtttgtgctcgatgagcaggcggcggcgatcagctggttcggccagccgctgaatctgacgcgctacgaatttctgctgttgaaaaccctgcttcacgcgcccggtcgcgtcttctcccgtcagcagttgatggagctggtgtggatcgatgcctgggaaagcctcgaccgtaccgtcgatacccatatcaaaaccctgcgcgctaagctgcgggctgtgaatcctgaaaaggcgccaatcaatacccatcgcggtatgggctacagcctggggcgcggctgatgcgtatcggcatgcgcctgctgctgggctattttcttatcgtcgcgatcgccgcgtggtttgtgctgtcgatctttgtccaggaagtgaagccgggcgtgcgccgggcgacagaggggaccctcaatgataccgctaccctgttggcggcgctggcgcgtgaggatctgctggcggcaaacccgcagcagggcaggctggcgcaggcctttcaccagctcaaccagcagccgctcaacgccaatattggcggaattaaaaaggtacgtaatgagtaccgcgtctatctgaccgatgcccggggcaaggtggtgtttgactccagcgggcaggcgacagggcaggactattcgcgctggaacgatgtctggctcaccctgcgcggccagtacggcgcgcgcagtacgcgcagcgatccgcatgatgaagccagctcggtgatgtatatcgccgcgccggtgatggataaggggcggattatcggcgtgctgagcgtcggtaaacccaacctggcgatgacgccggtcattaagcgcagcgagcggcggatcctctgggccggcggcgccctgctgggcattgcgctgttgattggcggcggcgtcgtctggtggatcaatttctctatcggcaagctggtgcgctatgcggactcggtgaccgctgagcgcccgctgccgctgccggaggttggcagcagcgaattgcgcaagctggcccaggctctggagagcatgcgggtaaagctcgaaggtaagaatgccatcgaaaactatgtctatgacctgacccatgaactgaaaagcccgctggcggccatccgcggcgcggcggagatcctgcgcgaagggccgccgcctgaggtggcggcgcggtttactgataatatcctcgcgcaaaacacccggatgcaactgctggtggagcggctgctccagcaggcgcgactggaaagccggctggagataaagcagcagccggtgttgatagatgcgctataccaacggctgacggaggagcgcaacatcgctctggcggcgaaagctatcaccctgcgctggcgggagagtgggatgctggtcaatggcgatggcgagctgctggcccaggcgctgggtaatctgctcgacaacgcgattgactttaccccccagggcggtgagatcgccctggctgcggagaagcgaaatgaagaggtgcaattgagcgttatcgacaacgggtgcggtattccggactatgccctggaacgaatctttgagcgattctattcgctgccgcgcgaagacggccataagagcagcggccttgggctggcgttcgttcgtgaagtcgcgcgcctgcatcacggcgatatcaatctgcacaatcggcccgaaggcggcgtggtcgccacgctgcgacttcaccgtcacttcacatagcttcaaattctccccacacagccgtcctattgtgaggccatcacgatagggagaaaggctatgttgaaatcaccgttattctggaaaatcaccacgttaataggctgtattgtgctgctatctttgccgttaatgatggtcagggagcttattaatgagcgagcggattatcgtagcgaagtggtggacgccattgagcaaagcaccagcggctcgcaaaaactcgccggaccgctgatcgctattccgataaccgagaccctgacccgcatggagaaccaaaaagaggtcaactatcagcggagctgggtgtattactggctgccggagtcgctggcggtcgccggcaaacagaccgtggagtcgaggagggtgggcatctacagcggccaggtctggcataacgccttgcagattaaggcctcgtttgatccgctgcgtctggcggcgctgagaaaaacgaatatcgtcttaggccagccgcggctggtggtgagcgtcggcgatgcccgcggcattggcgccatccatgccccggaggtcaacggtaacgtattaagcgtggagccggggctggggataagcggcgatggcgcaggtattcatatgccaatgcctgcgctggcggaggacaacaagccgcttgagattgccttttcactcgatctgaacgggacgggtgagttttcactggtgccgctcgggcgtaacagcgagctgcagctgaccagtaactggccgcatcccggttttctcggcagcttcctgccaacgcaacgggaagtgagtgctgccggctatcgcgcccactggcaaagcagctggttcgccaacgatatggggagctatttcaaggatgatatggagatcccgtggtcgcgactgccggcgttcagtgccgatgtgatgtcccttgccgaccagtaccagctaaccgatcgggcgacaaaatatgccatcctgttaatcgggctgacctttatggcttttttcgtgttcgagagcctgacccgtcgtcccctgcatccgatgcaatatctgctggtgggcttatcgctggtgctgttttacctggtgctgctggcgctctcagagcacattggttttaccgccgcctggctggcggccagcctgtctggcgcggtgatgaatgggatctaccttcaggcagtgctcagaggatggcgtaacagcctgctgtttgtcgccgcgctactgctgctggatggcgtgatgtggtttctgttgcattctgaggatagcgcgctgctgctgggtaccggggtgctggcgctggcgctgagcgtcctgatgtttttgacccgtcgcgtggactggtatgcgttatcgctgccgaaaggcacagtgcctccgacaccggctgccgatgacgataagctgcgtctctggaaagagtgacggcataaaaaacggcgcccctggggcgccgttttcgcatcatggctgcggaataaatcgtattattcctgcagatcgccacagaaacggtagccttcaccgtgaatggtagcgatgatttccggggtatccggagtggattcgaagtgtttacgaatccgacgaatggtcacgtcaacggtacggtcatgcggcttcagctcgcgaccggtcattttcttcagcagctcggcacgagactgaattttgcccgggttttcgcagaagtgcagcatcgcgcggaattcactgcgcggcagcttgtactgttcgccgttcgggctaaccagggaacggctgttgatatcgagttcccagccgttgaacttgtagctttccacgctgcgacgctcttcgctcacggtaccgaggttcatggtacgggagagcaggttgcgcgcgcggatagtcagttcacgcgggttaaacggtttagtgatatagtcgtcagcgccgatttcgaggccaaggatcttatccacttcgttgtcgcggccggttaagaacatcagcgcgacgtctgcctgctcgcgcagctcgcgcgccagcagaagaccatttttacccggcaggttgatatccatgatcaccaggttgatatcattttcagacaggatctgatgcatttccgcgccatcggtcgcttcgaatacatcgtaaccttctgcttcgaaaatactttttaacgtgttgcgtgttaccaactcgtcttcaacgataagaatgtgcggggtctgcatgtttgctacctaaattgccaactaaatcgaaacaggaagtaccaaagtccctgacctgcctgctgcatgtcgcaaattaacatgcgcggcgtaacatgactaaagtacgtaattgcgttcttgatgcactttccatcaacgtcaacaacatcattagcttggtcgtgggtactttccctctggacccgacggtgtcaaaaacggctgacatcctaaccattttaacagcaacataacaggctaagagaggccgaacacccaataaaactacgcttcgttgacatatatcaagttcaattgtagcacgttaacagtcttgtgaaatcattgcatcgccatgctctttatagtcacaatctttacccggctcaactagttgcgtggataaattaataaatacagtgaatccaaagcctgaaacgatgcatcagatgaaattgcattgcccatcatatggataaatgggttctgttaacatactccttgtcacggcctcctgagaacagtttagatttttttatgggtaagaaaacgcaattttagtgatttttgttgcaaatttgtaaattttcaccgcgtaaaatggggggcgctgcgcctcgataacgcctgagagagagaaagaaaccgcaatgcgtttaacgattattttagtcggtcctgcccgggccgagaacgtcggcgctgccgccagggcgatgaaaaccatgggatttcgcgaactacggatcgtcgatagcgaagcccacctggcgccgccggcacgctgggtggcgcatggctcaggcgacatcctcgatggtatcaccacctatcccacccttgccgaggcgctgcatgacgttgattttaccgtcgccaccaccgcccgcagccgcgcgcgttttcactattacgccacgccgcagcagctgttgccgctgctggaggagaaggcgcagtggatgaaccatactgccctggtatttggtcgtgaggacgccggattgaccaatgaggagctggcgctggctgatgtgttgaccggtgtgccgatggctgcggattatccgtcgctgaatctcggccagtcggtgatggtctactgttatcaattagcatcgctaatgcaacaaacggcgcccgccgccgctgcggcagaccatcatcagctgcaggccttacgtactcgtaccctggcgttactttcgcgtttgggcgtggaggatgatgccaaactggccgactggttgtcgcaacggctgggcctgctgcagcagcgcgacacggcaatgttgcatcgtttgctgcatgatattgaaaaaaacctgccagaataaaactctgtcatattttttatt
